United States Patent Application Publication US 2025/0302930 A1 - sequence listing, part 2

SEQ ID NO: 907 - DNA, 21621 bp, Homo sapiens
  source 1..21621: mol_type = other DNA
agcagttttgaaaagctctttttgtaatatctgcaagtggacatttggagcgctttttggcctatggtggaaaaggaaatatcttcatttaagaactagatggaagcattctgtgaaactgctttgtgatgtgtgcattcctctcacagagctgaaactttattttaatttagcagttttgagaactctcattttgtagaatctgcaagtggacatttggagcactttgcggcctatggtggagaaggaaatatcttcacattaaaactaggcagaagcattctgacaagcttatttgtcatttatctcatggagttgccatttatctcatggagttgaacttaactttcgatagagcagttttgaaacactccttttgtagaatctgcaagtggacatttggagagctttgaggcctgtggtggaaaaggaaatatcttcacacaaaactagccagaagcaatctgacaaagtttttgtgatgtgtgcattcatctcgcagagtggaaccttaatttcgattgagcagttttgaaacactccttttgtagaatctgtaagtggacatttggagcgctttgatgcctatggtggaaaacgaaatatcttcacataataactagacagaagcattctgagaaacttctatgtgatgtgtgcattcatctcatagagttgaaactttcttttgattgagccactttgaaacactctttctgtagtatctgcaagtggacatttttggcgctttgaggcaatggtggaaaatgtaatatcttcacataaaaactagacagaagaattctgagaaacttctttgagatgtgtgtcttcatgttacagagttgaacctttcttttgattgagcagtttggaaacacactttttgaagaatcttcaggtggacaattggagcacttagtggcctatggtagaaaaggaactatgttcacatacaatctagacagaagcaatcggacaagagcaactctgaaacactctttctgtagtatctacaagtggacatttttggcgctttgaggcaatggtggaaaaagaaatatcttcacacaagaactatacagaaacattctgaaaaacttcactgagatgtgtggattcatctcacagagtagaacctttcttttgattgagtagttttgaaagactctatttgtagaatctgaatttggacatttggtgcgctttgtggcccatggtggaaaaggaaatatcttcacataaaaactagacagaagcattctgacaaacttcttcatgattgcgcattcatgtcacagagttgaacctttcttttgaatgagcagctttgaaacactctttttgtagaatctgcatgtggacatttggagctctttgaggcctatggtggaaaagtaaataccttaatataaaaactatacagaaatattctgacaaacttctttgttatgtgtacattcttcacacagattagaacctttcttttcattgagcagttttgaaaaactctttttgtggaatctgcaagtgtacatttgaagcgctttgaggcctatggtttaaaaggaaatatgtgcacataaaaactagacagaatcattcatagaaaatcctttgtgttgtgggcattcatctcaccggattgaacatttcttctgattgagcaggtttaaacactctttttgtagaatctgcaagtggacattgggagccctttgagtcctatggtggaataggaaacatcttcatttaagaactagacagaagcattctgagaaacatctttgtgatgtgtgcattcatctcacagagttaaacatttcttttgattgagctgtcttgaaactctattttgtagaatctgcaagtggacatttggagcgctttgaggcttatggtagaaaaggaaatatcttcacataaaatctagacaaaagcaatctgagaaacttctttgtgatgtgtgcattcatctcacagagttaaaatttcttatgattgagcagttttcaaactctctttttgtagaatctggaagtggacatttggagcccttttaggcctatggtggaaaaagaaatatcttcccataaaaactagacagaagaattctgagaaacttcttggtgatgtgtgcgttcatctcacagagttgaaactttcttttgattgagcagtttggaaactctctttttgtagaatctgcaagtggacatttggagcgctatgcggcctatggtagaaaaggaaatatcttcacataaaacctacacagaagcaatctgagaaacttctttgtgatgtgtgctttcatctcacagagttaaacctttcttttgattgaggagttttgaaactctctttttgtagaatctgcaagtggacaattggagcacttcgaggccttcggtggaaaagaaaatatctccacataaaaatagacagaagatttctgagaaacttctttgtgatgtgtgcattcatttcacagatttgaacatttctgttgattgagtagtttggaaactctcttttttagaatctgcaagtggacatttggagcgctttgcggcctatggtagaaaaggaattatcttcacataatatctagacagaagcaatctgagaaacttctttgtgatatgtgcattcatctcacagagttaagccattcttttgattgagcagttttgaacctctcttttcgtagactctgcaagtggacatttcgagcactttgaggcttatggtgaaaaaggaaatatcttcccataaaaagtagacagaagaattctgaaaaactttgtgatgggcacgttcatctcacagagttgaaactttcttttgattgagcagtttggaaaccctctttttatagactctgcaagtggacatttggagcacgttgcggcctatggtagactaggaaatatgttctcataaaatctagacagaagtaatctgagaaacaactttgtgatgtgtgcattcatctcacagagataaacatttcttttgattgagcagttttgaaactgtctttttgtagaatctgcaagtggacatttggagcgctttgaggcctatggtggaaaaggaaatatcttcacataaaaactacatagaagcattctgagaaagattttgtgatgtgcgcattaatcacccagagttgaatctttcttttgaaggaccagttttgaaatactctgtttgtagaatcttcaagtggacatttcgagtgccttgaggcctatggtttaaaaggaaatatcttcacataaaaacaagacagaagaattctgagaaagttctttgtgatatgtgcgttcatctcgcagaattgagcctttcttttgattgagcagtgttgaaaccctctttttgtagaatctgcaaatggtcatttgcagcactttgaagcctacggtggaaaaggaatttatcttcacataaaaactagagagaagaattctgacaaacttctttctgatgtgtgcgttcatctcacagagttgaaactttcttttgattgagctgtttggaaacactctttttgtagagtctgcaagtggacatttggagcactttgtggcctatgatagaaaaataaatatcttcacataaaattcagagagagccaatctgagaaactactttgtgatgtgtgcattcatttcacaagtgaaaactttagttggcttgagcagttttgaaactctctttttgtagaatctgcaagtggacatttggagcgctgttaggcctctggtggaaaaggtaatatcttcacataaatactagacagaagaattctgagaaacttctttgtgatgtgtgcattaatctcactgagttgaaccttcattttgattgagcattttggaagcactccttttgcagaatctgcaagtgcagatttggagcgctttgtggccagtggtagaaaaggaaatacctgcaaataaaatctagacagaagcaatatgagaaaataatttgtgatgtgtgcattcttctcagagacttaaacatttcttttgatggagcattttttaaactctgtttttgtagaatctggaagtgtacatttggagcggtttgaggacaatgtggaaaagaaaatatcttcacatcaaaaccagattgaagaatactgggaaacttctttgtgatgtgtgcgttcatctcacagagtggaacctttcttttgattgagctgtttggaaacactctttttgtagaatctgcaagtggacatttggagcactttgtggcctatggtagaaaaggaaatatcttcacatagaattcagacagaagcaatctgagaaactgctttgtgatgtgcacattcatttcacagagttaaacttttcttttgattgagctgtcttgaaactctattttgtagaatctgcaagtggacatttggagcactttgtggcctatggtagaaaaggaaatatcttcacatagaattcagacagaagcaatctgagaaactactttgtgatgtgcacattcatttcacagagttaaacttttcttttgattgagctgtcttgaaactctattttgtagaatctgcaagtggacatttggagcactttgtggcctatggtagaaaaggaaatatcttcacatagaattcagacagaagcaatctgagaaactattttgtgatgtgcacattcatttcacagagttaaacttttcttttgattgagctgtcttgaaactctattttgtagaacctgcaagtggacatttggagcgctttgaggcctatggtagtaaaagaaacatcttcacataaaatctagacaaaagcaatctgagaaacttctttgtgatgtgtgctttcatctcacagagttaaaacttttttttgattgagcagttttgaaactctctgtttgtagaatctgcaagtgaaaatttggagcgcttttaggcctatggtggaaaaggaaatatcttcccataaaaactagacagaagaattctgagaaacttctttgtgatgtgtgcattcatctcacagagttgaaacttccttttgattgagcagtttggaaacactctttttgtagaatctgcaagggaccatttggagtactgtgaagcctatggtagacaaggaaatatcttcacataaattctagacagaagcaatctgagaaacttctttgtgttgtctgcattcatctcatagagttaaacatttcttttgattgagcagttttgaaactttttgtagaatctgcaagtagacattcggagcactttgaggcctatgctggaaaaggaaatatcttcacataaaaactagacagaagaattctgagaaacttctttgtgatgtgtgcactcatatcacagagttggacctttctttttattgagcagtttggaaacactgtttttgtagaatctgcaactggacatttggagagctttaaggcctatctttgaaaaggaaatatcttcacataaaaactagacagaagaattctgagaaatatctttgtgaggtgtgcattcatctcacagagtaaaacattttattgattgagcagttttggaactctcttttcattgaatctgcaagtggacatttggagcgctttgcggcctctggtggaaaaagaaataccttcacataaaaactagacagaagaattctgagaaacttcttcgtgatgtgtgctttcatgttacagagttgaagctttcttttgattgagcagtttggaaacattcttttgtagaatgtgtaagtggatatttggagcactttgcggcctatgatagaaaaggaaatatcttcacataaaatctagacagaagaaatctgagaaacttgtttgtgatgtgtgcattcatctaacagagttaaaactttctctttattgagcagttttgaaactctctttttttagaatctgcatgtggacatttggagcgctttgaggcctatggtggtaaaggaaatatcttcacataaaaactagatagaagcattctgagaaacctctttgtgatgtgtgggttcatatcacagagttgaaactttcttttgattgaccagttcagaaacactccttttgtataatctgcacgtggatatttggagtgctttgcgtcctatggtagaaaaggaaatttcttcacataaaatgtagacagaagcaatctgagaaacgtctttgtgatgagcgcattcgtctcacagatttaaacctttcttttgattgagcagtttttaaactacctttttgtagaatctgcaagtggacatttggagtgctttgaggccaatgttggaaaaggatatatcttcacataaaagctacacagaagaattctgagaaacatctttgtgatgggtgcattcacctcagagttgaaccttccttttgattgagcagtttggaaaccctctttttgtggaaactgcaagtggatatttggaggaatttgtggcctatgctagaaaaggaaatatcttcatataaaatctagacagaagcaatctgagaaacttctttgtgatgtgtgcatgcatctcactgagttaaaccattctttcaattgagcagttttgaaactctctttttttagaatctgcaagtagatatttggagctgtttcaggacgatggtggaaaaggaagtatcgtcatataaaaactagccagaagatttctgagaaacttctttgtgatgtgtgcattcatcccacagagttgaactttttttttgattaagcagtttggaaacactctttttgtagaatctgcatgtggacacttggagcactttgaagcctatggtggaaaaggaaatatcttcacataaaacctagacagaagcaatctgagaaacttctttgtgatgtgtgcattcatctcacagagttgaaccttccttttgattgagcagtttggaatccctctttttgtagaatgtgcaagtggacatttggagcgctttgcggactatggtagaaaaggaaatatcttcacattaaatctagacagaagcaatctgagaaatttctttgggatgtgtgcattcgtctcacagagttaaaccttccttttgatagagcagtattgaaactctctttttgtagaatctgcaagtggacatttggagtgctttcaggcctatggtggaaaaggaaatatcttcacataaaaactagacagaagaatttggacaaacttctttgtgatgtgtgcattcatctcacagaattgagcctttcttttgattgagcagtgttgaaaccctcttcttgtagaatctgcaaattgtcgtttggagtgctttgaggcctgtggtggaaaaggaatttatcttcacataaaaactagagagaattctgacaaacttctttatgatgtatgcgttcatctcacagagttcaaactttcttttgattgagcagcttggaaagagtctttttgtagaatctgcaagtggacatttggagtgctttttggcctatggacgaaaacgaaatatcttcatataaaatctagacagtagcaatctgagaaacttctttgtaatgtgtgcattcaactcagagagttaaaacttcagtttgattgagcagttttgaaactctctttttgtagaatctgcaagtggacatttggagcgctttgaggtctatggtagaaaaggaaatatcttcacataaaaactagacagaagaattctgacaaacttccttgtgatgtgtgtgttcatctcactgagttgaatctttattttgattgagtagtttggaaacactctttttgtagaatctgcaagtggacatttggagcacttttcggcctatggtagaaaaggaaataccttcacataaaatctagacagaagcaatctgagaaacttctttctgatgtatgcatttatctcacagagttaaacctttcttttgattgagcagttttgagactctctttttgtagaatctgccagtggacatttggagtgctttgaggtgtacggtggaaaaggaaatatcttcacataaaaactagacagaagaattctgacagacttctttgtgatgtttgtgttcatctcacagagtagaacctttcttttgatagagcagttttgaaactctctttttatagaatgtgcaagtggacatttggagcactttcaggcctatggtggaaaaggaaatatcttcacataaaaaaatgacagaaaaattctgagaaacttctttttgatgaatgcgttcatctgagagagttgaacctttcctttgattgagcagtttggaaacactctttttgtagaatctgcaagtggacatttggagtgctttgaggcctatggtggaaaaggaaatatcttcacataaaatctaacagaagcaatcagagaaacttcattgtgatatgtgcattaatttcagagagttgaacttttcttttcatggagtagttttgaaactctctttttgtaaaatctgcaagtggacttttggagcgctttgaagcctatggtggaaatggaaatatcttcatataaaatctagactgaagaattctgagaaacttctttttgaagtgtgttttcatctcatttgaactttccttacgattgagcagtctggaaacactctttttgcagaatctgcaagtgaacatttggtgtgttttgcagcctatggttgaaaaggaaatatctccatataaaatctagacagaagtaatctgagaaactcctttctgatgcgtgcattgatctcatagagtttaacctttcttttgattcagcagttttgaaactctctttttgtaatatctgcaagtggacatgtggtgcgctttgaggcctatggtggaataggaaatatcttcacataaaaaatagatagaagcattctgtgaaacttctttgtgatgtgtgcattcatctcccaagtctgaacctttcttttgatggactagttttgaaatactcttttcgtggaatctgcaagtggacatttcgagcgcattaaggtctatggtggaaaatgaaatatcttcacataaaaactagacagaagaattttgagaaacttctttgttttttgtgctttattctcacagagttgaatctttcttttatttgagcagtttggaaacactctttttgaagggtctgcaagtggacatttggagtgctttgcggcctatggtaggaaaggaaatatcttcacataaaatatagacagaagcaatctgtgaagcttctttgtgaagtgtgcattcgtctcagagttaaacctttcttttgattgagcagttttgaaactcactttttgaggaatttgcaaggggacatatggagcattttgtggcctatggtggaaaaggaaataccttcgcaaaaaactagacaaaagaattctgagaaactattttgtgatgtgtgcgttcatctcacagagttaaactttttttgatcgagcagtttggaaccacactttttgaacaatctgcaagtggacatttgaagctctttgagaactgtggtggaaaaggaaatatcttcacataaaaactagacagaagaatactgtgaaatcactttgtgatgcgtgcgttcatcacacagagttgaaagtttcctttcattgggctgtttggaaacactctttttgtagaatctacaagtggacaattttagcgctttgcggcctatggtagaaaaggaaatatcttcacataaaatctagacagaagcaatctgacaaacttctttgtgatgtgtgcattcatctcacagagttaaacctttctttttattgagcagttttgaaactctctttttgtagtatctgcaagtggacatttggagcccttttaggcctgtggtagaaaaggaaatctcttcacataaaaactagacagaagaattttgaaaaacttctttgtgatgcgtgctttcatctcccatagttgaaactttcttttgatacagcaggttggaaacactcttttgtagaatctgcaagtgcacatttggagtgctttgcggcctgtagtagaaaaggaaatatcttcacataaagtctagacagaagaaatctgagaaacttctttgtgatgtgtgcattcatctcatggagttaaacttttcttttgattgagcagtcttgaagctctctttttgtagaatccgcaaatggatatttggaactctttgaggccaacagtggaaaaggaaatatctgcacataaaaactagacagaagaattctgagaaacttctttgggacgtgtgcattcatctcacagatttgaacctatcttttgattgaacagttcggagacactctttctgtagaatatgcaagtggacatttggagaactttgtggcgtatggtagaaaaggaaatatcttcacataaaatctagacagaagccatctgagaaacttctttgtgatgtgtgcattcatctcacagagttaaacctttcttttgattgagcagtttggaaacactctttttgtagaatctcaaagtggacatttggagcacttagaggcctatggtggaaaaggaaatatcttcacataaaaactagatggaagaattctgataatcttctttgtgatgtgtgtgttcatctcacaaagctgaaattttcttttgattgagcagtttggaaacactctttttgtagaatctgcaagtggacatttgcaacgctttgcggcctatggttgaaacagaaatatcttcacataaaatctagaaagaaacaatctgagaaacttctttgtgatgtgtgcattcatctcacagagttaaacctttctttggattgagcggttttgaaactctctttttgtagaatctgcaagtggacatttggagagctttgaggcctatggtggaaaaggtaatatcttcacataaaaactagacagaagaattctgacaaacttcttgggaatgtgtgcgttcatctcacagacttgaacctttcttttgattgagcagtttggaaacactcttttttgtagaatctgcaaatggacatttgaagcactttgcgacctatggtagaaaaagtaataccttcacataaaatctagagagaagaaatcggagaaacttcttagtgatgggtgcattcatctcacagagtttaaactttcttttgattcagcagttttgaaactctctttttgtagaatctgcaagtggacatttggaacgcttgaggcctatggtggaaaaggagatatcttcacataaaaactagaaagaagaattctgacaaacttctttgtgatgtgtgcgttcttctcacagagtgtaaccgttctttcgattgagcagtttggtaccactctttcttgtagagtctgcaagtggacatttggagcgctttgcagtctatggtagaaaagtaaatatcttcacatataatctagacagaagtaatatgagaaacttgtttgtgatatatgcattcatctcacagagataaccctttcttttgattgagcagttttgaaactctctttttgtagaatctgcaagtgaacatttagagcatcttgaggcctatggtggaacaggaaatatcttcacataaaaattagacagaagaattctgagaaacttctttgtgatgagtgtgttcatctcacagagttgaacgtttcttttgattgagtagtttggaaacactctttttgtagaatctgcaagtggacatttggaactctttgcggccaatggtagaaaaggaaatatcttcacataaaatctagacagaagcaatctgagaaacttttgtgatgcgtgcattaatctcacagagttaaacctttcttttgattgagcagattggaaactctctttttgtagaatctgcaagtggacatttggcagcgcttcgaggcctgtggtggagaaggaaatatcttcacataaaaagtagatagaagcattctgagaaagttctctgtgatgtctgcactcatctcctggagttccaactttctttaggagaaccagttttcaaatactctttttggagaatctgcaaggggacatttcaagcaccttgaggcttaagttggaaaagaaaatatcttcacacaaaaaaagaagaattctgagaatcttttttatgatgtgtacgttcatctaacagagttgaacctttcttttgattgtgtagtttggaaacaccctttttgtagaatcggcaagtggacatttggagcgctttgtggcctatgatagaaaaggaaatatcttcacataaaatctagaaggaagcaatctgagaaactcctttgtgatgtgttcattcatctcacagagttgaaactttcttttgattgagcagttttgaaacactctcttcgtggaatctgcaagtggatatttggagccctttgaggcctattgtggaaaaggaaatttcttcacataaaaactactcagaagcattctgagaaacaccattgtcatgtttgcattcaactcacagagttgaaactacattttgattgagcagttttgaatctctctttttgcagaaactacaagtgtatgtttggaaagctttgaggcctattgtggaaaaggaaatatcttcacataaaaactacacagaagcattctgagaaactactttgtgaggtgtgcattcaactcacagagttgaaattatcttttctttgaggagttttcaatctcactttttgtagaatctgcaagtggatatttgacgacctttgtgccctatggtggaaaaggaaatatcttgaaataaaaactacacagaagcattcagagaaacttcttcgtgatatgtgcattcaactcacagagttgaacctatcttttgattgagcagttttgaatctctctgtttgcacaatctgaaggtggatattttgagccctttgaggcctacagtggaaaagcaaatatcttcacataaaaactatgcagaagcattgtgagaaactactttgtgaggtgtgcattcaactcacagagttgaacttatcttctcattgagcagttttgaatttatcttttggtagaatctccaagtggatatttggagccctttgcgccctatggtggaaaaggaaatatcttcaaataaaaactacacagaatcactcagagaaactgctttgtgatgtgtgcattcatctcacagggttgaacctagcttatgattgagcagttttgaaacactctttttgtaggatcttcaagtggatatttggagcgctttgaggcctacagtggaaaaccaaatatcttcaaataagaactacacagaagcattctgagaaacttctttgtgatgtgtgcattcatctcacagagttgaaactttcttttgattgagcagttttgaaacactctttctgttgaatctgcaagtggatatttggagccctctgcagcctatggtggaaaaggaaatatcttcaaataaaaactacaaagaagcattcccagaaacttcttaatgatgtatgcgttcaactcacagagttgaacctatcttttgattgaacagttttgaatctctctttttgtagaatctgcaagtggatatttggagcgctgtgaggcctattgtggaaaatcaaatatgttcacataaaaactacagagaagcattctgagaaacttctttgtgctgtgtgcattcaactcacagagttcaacctgtctttcaattagcacttttgaatctctttttgcagaatctgcaagtggatgttgggagagctttgaggcctatggtggaaaaggaaatagcttcacataaaaactacacagaagcattctgagaaacttctttgtgatgtgtgcattcatctcacagagttgaacctttcttttgattgagcagttttgaaacactctttttgtagaatctgcaagtggatatttggagaactttgaggcctattgtggaaaaggaaatatcttcacataaaatctactcagaagcactctgagaaacttctttctgatatgggcattcaactcacagagttgaacctttcttttgattgagcagttttgaaacactctttttgtagaatctgcaagtggatatttggagccctttgcaccctatggttgaaaaggaaatatcttcaataaaaactacacagaagaattctaagaaacttcttcgtgatgtgtgcattcaactgactgagttgaacttatcttctcattgagtagttttcaatctctgttttgtagaatctggaagtggatgtttggagccctttcaccctattgtggaaaaggaaatatctgcaaataaaactacacagaatcattcagagaaacttctttgtgatgtacacattcaactcacagagttgatcctatcttttgattgagcagttttgaatccctctttttgcagaatctgcaggtggatatctggagccttttgaggcttactgtggaaaatcaaatatgttcacataaaaactacacagaaagattctgagaagcttctttgcgatgtgtgcattcaagtcacagagttgaacctatcttttgattgagcagttttgaatctctctttttgcagaacctgtatgtggatgtttggagagcttggaggcctattgtggaaaaggaaatatcttcacataaaaactacagagaagcattctgagaaacttctttgtgaggtatgcattcaactcacagagttgatcttatcttctcattgagcagttttgaatctctccttttgtagaatctgcaagtggatatttggagccctttgagccctgtggtgcaaaaggaaatatcttgaaataaaaactacaaagaagcattcagacaaacttctttgtgatgcatgcattcaactcacagagttgaacgtatcttttgattgagcagttttgaatctctctttttgcaaaatctgcaggtggatatttggagccctttgaggcctactgtggaaaagcaaatatcttcacataaaaattacacagaagtattctgagaaactacttcgtgacgtgtgcattcatctcacagggttgaatctatctcatgattgagcagttttgaaacactctttttgtagaatatggaagtggatatttggagcccattgaggcctatagtggaaaggaaatatcttcacataaaaacaacacagaaggattctgagaaacttctttgtgatgtgtgcattcatctcactgagttgaatctttcttttcattgcgcagttttgaaacaccatttttgtacaatctgcaagtggatatttggagaactttgccgcctattgtggaaaaggaaacatcttcacataaaaactactcagaagcattctgagaaacttctttgtgatgtgggcattcaactcacagagttgaacctaccttttgattgagcagtttagagtctctctttttctataatctgcaagtggatatttggagccctttgcaccctatggtggaaaagaaaatatcttcaataaaaactacacagaagcattctaagaaacttcttcatgatgtgtacagtcaactcattgagttgaacttatcttctcaatgagcagttttgaatctctggttttgtagattctgcaagtagatatttagagccctttgtgccctatcgtggaaaaggaattatcttcaaatagaactacacagaaccattcagagaaacttctttctgatgtatgcattccactcacaaagttgaacctatcttttgattgagcagttttgaatacctctttttgctgaatctgcaagtggatatttggagcattttgaggcctgctgtggaaaatcaaatatgttcacataaaaactacacagaatcactcagagaaactgctttgtgatgtgtgcattcaactcacagagttgaacctatcttttgattgagcagttttgaatctctctttttgtagaatctgcaagtggatattaggagccctttgcgtcctatggtggaaaaggaaatatcttcaaataaaaactacatagaagcattcagagaaactgctttgtgatgcgtgcattcaactcacagaggtgaacttatgttttgtttgagcagttttgaaactctctttatgcagaatctgcaggtggatatttggagaccttcgaggcctactgtggaaaaggaaataacttcaaataaaaactatacagaagcattctcagaaacttcttcatgatgtatgcattcaactcacagagttgaacctatcttttgattgaacagttttgaatctctctttttgcacaatctgcaagtggatatttggagcgttgtgaggcctactgtggaaaatcaaatatgttcacataaaaactaaacagaagcattctgagaaacttctttgtgatgtgtgcattcaactcacagagttgaacctatcttttgattgagcagttttgaatctctctttttgcagaatctgttagtggatgtttggagagctttgaggactattgtggaaaaggaaatatcttcacataaaaactacagagaagtattctgagaaacttctttgtgaggtgtgcattcaactcacagagttgatcttatcttctcattgagcagttttgaatctctttttttgtagaatctgcaagtggatatttggagccctttgagccctatggtgcaaaaggaaatatcttgaaataaaaactacaaagaagcattcagacaaacttatttgcgatgtgtgcattcaactcacagagttgaaaatatcttttgattcagcagttttgaatctctctttttgcagaatctgcaggtggatatttggagccctttgaggactactgtggaaaagcaaatatcctcacataaaaattacacagaagcattctgtgaaactacttcatgacgtgtgaattcatctcacagggatgaatttatctcatgattgagcagttttgaaacactctttttgtagaatatggaagtggatatttggagcccactgaggcccacagtggtaaggaaatatcttcacataaaaacaacacagaaggattctgagaaacttctttgtgatgtgtgcattcatctcacagggttgaaactttcttttcattgagcagttttgaaacaccgtttttgtagaatcttcaagtggatatttggagaactttgctgcttattgtggaaaaggaaacatcttcacataaaaactactcagaagcattctgagaaacttctttgtgatgtgggcattcaactcacagagttgaacctatctgttgattgagcagtttagagtttctctttttctagcatctgcaagaggatatttggagcccaatgcgccctatggtggaaaaggaaatatcttcaataaaaactgcacagaaacattctaagaaacttcttcgtgatgtgtacattcaaatcactgagtcgaacttatcttctcaatgagcagttttgaatctctggttttgtagaatctacaagtggatatttggagccatttgtgccctatggtggaaaaggaattatctttaaataaaactacacagaaccattcagagaaacttctttgtgatgtatgcattcaactcacaaagatgaacctatcttttgattgggcagtttagaatctctcttttgaagaaactgcaagtggatatttggagccctttgcgctctgtgttggaaaaggaaatatctttaaataaaaacaacacagaagtagtcagataaacttctttgtgctgtctgcattaaactcagagagttgaaacttccttttggtagagcagttttgaaacactctttttgtagaatctgcaggtggatatttggagcgctttgagacctatggtagaaaaggaaatatgttcatacagaaactagatagaagcattcacagaaactactttgtgatgtgtgcattcaactcaaagagttgaacattcctttagtcagagcagttttgcagcactctttttgtagaatctgcaagtggatacttggactgctctgaggcctatgttggaaaaggaaatatcatcacacaaaaactagacagaagcattctcagaaacttctttgtgatttgtgcattcaactcatggagttcaccattgctcttgacagaacagttttgaaacacactttttgtagaatctgcaagtggatatttggagtgctttgaggtcttcggtggaaacaggaataccttcacataaacactagacagaagcattctcagaaacttctttgtgatgtgtgcattcaattcacagagttgaaccttcttttcgatagagcagttttgagacactgtttttgtataatctgcaagtggacatttggatcgctcttaggcctacggtggaaatggaaatatttttagataaaaaccagaaagaagaattctcagaaacttctttgtgatgtgtgcattcaactcagagagttgaacctttcttttgatagagcaggtttgaaatacttttttgtagaatctgcaagtggacatttgcagcactttgaggccaatggtggaaaaggaaataacttcaaataaaaactagacagaagcattctcagaaacttctttgtgatgtttgcattcaacccacagatttgaacataccttatcatagagcagttttgaaacactcttttagtagacttcgtaaggggatatttggaccgctctgaggccttcgctggaaacgggaataccttcacataaagactagacagaagcattctctgaaacctcttagtgatgtgtgcattcaactcacagagttgaatttttcttttgatagagcaggtttgaaacactctttttgtagaatctgcaagtggatatttggatagctttgaggatttcgttggaaacgggaatatcttcaattaaaaactatacagaagcattctcagaaacttctttgtgatgtgtgcattcaactcacagagttgaatctttcttttgatagagcagattggaaccacttttgttgtagtatttgcaagtggatgtttggacagctttgaggccttcgttggaaacgggtatcccttcacataaaaactacacagaagcattctcagaaacttccttgtggtgcttgcaatcaactcactgagtggaacattccttttcatagagtagttttgaaacactttttttgtagaatctgtaagtggaaacttgaagcgctttgaggcctatggtgaaaaacgaaatatcttcccataaaaactagacagaagaactctcagaaacttctttgtgatgtgtgtactcaattaacagagttgaacttttcttttgatagagctgttttgaaacacactttttgtaaaatctgcaagtgcatatttggatatctttgaggatttcattcgaaacgggattatcttcacataaaaaccagacagaagcattctcagaaaccactttgtgatgtttgcattcaactctcagagttgaacattccttttcatacagaagttctgaaacactctttttttttgtatctggtagtggacatttggagcgctttgaggcctatggtaaaaaacgaaatatcctcacataaaaacgagacagaagcattctcagaaacttctttgtcatgtgtgtactcaactcacagagtttaacctttcttttgatacagcacgtttgaaacactcctttttagaatctgcaagtggatatttagatagctttgaggctttcgttgtaaagggggaatatcttcatgtaaaaactagacagaagcattctcagaaacttctttgttatctttgcattccactcacagagttgaacattccctttcatagagcagttttgaaactctctttttgtgaaatctgcaagtggacatttggagcgatttgagacctatggtgaaaaacgaaatatcttcacctaaaaagtggacggaaggattctcagaaactactttgtgacgtgtttactcaacttacagagttaaacctttcctttgataaggcagttttgaaaaactgtttttgtagactttacaagtggatattaggacagctttgagtatttcattggaaacgggaataacttcacatagaaactagagagaagcattctcagaaacttctttgtgatgcttgcattcaactcactgagttgaacattccttttcatagagcagtttggaaacacaatttttgtagtatatggaagtggaaacttggagcgctttgaggcctatggtgagaaaggaaatatcttccataaaaactagacagaagaattctcagaaacttctttgtgatgtgtgtactcaactcacagagttgaacttttcttttgatagagcagttttgaaacacactttttgtagaatctgcaagtggatatatggatagctttgaggattttgttggaaacaggaatatcttcacataaaaacaagacagaagcattctcagaaacctctttgtgatgtgtgtactcaactcacagagtttaacatttcttttgatacaccagtttgaaacagtctttttgtagtatctacaagtggatatttggatagcttggcagctttcattggaaacgggaatatcttcacataaaaactagacagaagcattctcagaaacttctttttggtgcttgcaatcaactcagtgagttgaatattccttttcacagagcagttttaagacactctttttgtcgaatctgcaaatggaaactcggagggcgttgaggactattgtgaaaaaggaaatatcttcccataaaaactagacagaagaattctcagaatcttccttgtgatgtgtgtactgaactcacagagttgaacctttcctttgatacagcagttttgaaacactctttttgtagaatctgcaagtggatatttggatagctttgaggttttcgttagaaacgggaatatcttcagataaaatctagacagaagcattatcagaaacgtctttgtgatgtttgcattcaagtcacaaagttgaacattcgctttcatagagcaggtttgaaacactctttttgtagtatctgcaactggacatttggagcgctttgtggcctatggtgaaaaaggaaatatcttcccataaaaactagacagaagcattctcagaaacttgtttgtgatgtgtgtactcaactgacagagttgaacctttcttttgatagagcagttttgaaacactctttttgtagaatctgcaagtggatatttggatagctttgaggatttcgttggaaacgggaatatcttcatataaaatctagacagaagcattctcagaaacatctctgtgatgtttgcattcaagtcacagagttgaacattccctttcatagagcaggtttgaaacactctttttgtagtatctggaagtgcacatttggagcgcattgaggcctaaggtgaaaaaggaaatatcttcccataaaaactagacagaagcattctcagaaacttgtttaggatgtgtgtactcaactaacagagttgaaactttcttttgatagagca

SEQ ID NO: 908 - DNA, 51913 bp, Homo sapiens
  source 1..51913: mol_type = other DNA
ggaaaaggaaatatcttcacataaagacaagaaagaagcattctgagaaacttctttgtgatgtgtgcattcacctcacagagttgaacttttcttttgatttagcacttttgaaatactctttttgtagtgtctgcaagtggatatttggagcgatttacagcctatggtggaaaagtaaatatcttcacatcaaaaccagacagaagcattctgagaaactcctctgtcatctatgcattcatctcacagagttgaatgtttctcttgatggagcagttttgaaacactctttttgtaggatctgcaagtggatattttgagtgctttggggcctatggtggaaaaggaaatatcttcacataaaaactagacagaagcattctgagaaacttctttgtgatgtgtgcattcaactcacagagttgaaatattcttttgattgagcagttttgaaacactctttttgtagtatctgcaaagttggagggctttgggaattctagaggaaagggaaatatcttcccttaaaaactagacagaagcattctgagaaacttctttgtgatgtgtgcattcatctcacagagctgaacatttcttttgattgagcagctttgaaacactctttttgtagaatctgcaagtggacactgggagcgatttgaggcctatggaggaaaaggaaacatcttcacataaaaactacacaaatgccttctgagaaacttctttgtgatgtgtgcattcatctcacagaattgaacctttcttttgatcgaacagttttgaaacacttcttttgaaggatctgcatgtggatatttggatcggtttggggcctgtggtggaaaaggaaatatcttcaaataaaaactacacagaagcattctgagaaagttctttgtgatgtgtgcattcaactcacatagttgaagatttcttttgattgagcagttttgaaacaatctttttgtagtatttgcaagtggatatttggagcggtttgaggcctattgtagaaaaggaaatatcttcacataaatactagacagaagcactctgagaaacttctttgtgatgtgtgcattcatctcacagagttgaaactttgttttgattgagcagttttgaaacactctttttgtagaatctgcaagtggatacttggagtgctttgagcccaatggtggaaaaggaagtatcttcaattaaaaactagacagaagcattctgagaaacttctttgtgatgtgtgcattcaactcacagagtttaaactttcttttgattgaggagtttggaaaatctctttttgtagaatctgcaagtggatatttggagcattttgcggcctatagtggaaacggagatatcttcacataaaaactagacagaagccttctgagaaactcccttgtgatgtgtgcattcatgtctcagagatgaacctttcttttgattgagcagttttgaaacactctttttgtagaatttgcaagtggatatttggagtgctttgtggccaatggtggtaaaaggaaacatcttcacataaaaactggacggaagtattctgagaaacttctttgtgatttgtgcattcagctcacagagttgaacctttcttttgattgagcagtctgaaacactctttttgtacaatctgcaagtggataattggagcgctttaaggtctatggtgaaggaaatatcttcacacaaaaactagacagaagcattctgagaaacttctttgtgatttgtgcattcaacacgcagagttgaacctttcttttgattgagcagtttgaaacactctttttgtaaaatctgcaagtggatatttggagcgccttaaggcctatggtggagaaggaaatatcttcacataaaaactggacagaagcattctgagaaactactttgtgatgtgtgcattcatctcacagaattgaaactttcttttgattgagcagatttgaagcacactttttgtggaatgagaaagtggatatttggagcgcttcaagacctatggtggaaacggaaatatcttcacctaaaaacaacacagaagcagtctgagtaacttctttctgatgtatgcattcatctcacaaagttgaacatttctttggattcagcagttttgaaaaacactttttgtagtatctgcaagtggatatttggagcgctttggggcctatggtggaaagggaaatatcttcacctaaaaactacacagaagcattctgagaaacttctttgggatgtgtgcattcatctcacagagttgaacctttcttttgattgagaagttttgaaacactctttttgtagaatctgcaagtggatatttttaacgcttggcagcctatggtggaaaaggaaatatcttcacataaaaactagacagaggcattttgagaagctcctttgtgatgtgtgcattcatctcacagtgctgaacatttcttttgatttagctgctttcaaatactctttttgcagaatctgcaagtggatatttgaagctctttgaggcttatggtgggaaaggaaataccttcacataaaaactagacagaagcattctgagaaacttctttggggtgtgtgcattcatctcacagagttgaacctttcttttcattgagcagttttgaaacactccttatgtataatctgcaagtggttattttgagcgctttgagtcttctggtggaaaaggaaatattttcacataaaaagtagacagaagcattctgagaaacttctgtgtgatatgtgcattcatctcacagagttgaaccttatctttgattcagcagttttgaaacactctttttgtagaatctgcaagtggacatttggagctctttggggcctatggtggaaaaggaaatatcttcacataaaaactacacagaaacattctctgaaacttctttgtgatgtgtgcattcatctcacagagttgaacctttcttttcattaagcagttttgaaacactctttttgtagaatctgcaagtggatatttagtgcgctttgtggcctaaggtggaaaaggaaatatcttcacataaaaactagacggaatcattccgacgaacttctttgtgatgtgtgcattcatctcacagagttcaaacatactttcgattgagcagtttggaaacactctttttgtagaatctgcaagtggatatttttaacgcttggcagcctatggtggaaaaggaaatatcttcacataaaaactagacagaggcattttgagaagctcctttgtgatgtgtgcattcatctcacagtgttgaacatttcttttgatttagctgctttcaaatattctttttgcagaatctgcaagtggatatttgaagcgctttgaggcctatggtggaaaagggtctgcaagtggacatttggagagctttgaggcctaaggcggaaaacaaaatattttcatattataattagacagaagcattctgagaaagttctttgtgatatgtgcattcatctcacagagttgaaactttcttttgaatgagcagttttgacacactctttttgtagaatctccaagtggacatttggagcgctttgcggactatggtggaaatggaaatttcttcacataaaaactgttcagaaacattctgagaaacttctttgtgatgtgtccattcgtctgacagagttgaatctttcttttgattgagcaacttggaaactctctttttgtagaatctgctagtggacaattggagtgctttgaggcctatgggggaaaacaaactatcttcacttaagtactagacagaataattctgagaaacttctttgtgatgggtgcattcatttcacagagttgaatcattcttttttttgagcagctttgaaaaactctttttgtagactctgcaagtggacatttggagctctttgcagcctatggtggaaaaggaaatgtcctcacataaaaactagacagaagcattctgacaaactcctttgtgatgtgtgaattcatctcacagagttgtaactttcttttgattgaacagttttgaaacaatcgttttgtagaatctgcaattggacatttggagtgctttgcagcctgtggtggaaaacgaaatatcttcacataaaaactagacagaagaattctgagaaatttcttcatgatgtatgtattcatctcacagagttgaacataactttcaattgagcagttttgaaaccctctttttataggagcagcaagtggacatttggaggtctttgaggactatggtggaaaaaaatatcttctcattataactagacaaaagcattctgagaaacttctttgtgatgtgtgcattcatcacacacagttgaacctctccttagattgagcagctttgaaacactctttttgtagaatctgcaagtggacatttggagcgatttgaggcctatggtggaaaaggaattatctttacataaaaactatacagaaacattctcacaagcttctttgtgttgtgtgcatacaactcacagagttgaacctttcttttgactgagcagttttgaaacactctttttgtagaatctgcaagtggacatttggtgcactttgaggcatatggtggagaaggaaatatcttcacttaacaactaggcggaagcattctgagaaacttctttgtgttgtgtgcatttatcttacagagttgaaccatacctttgattgagcagctttgaaaaactcttttttagactgtgcaagtgaacattttgagctctttgtgtcctacggtggaaaaggaaataacttcacataaaaactagacagaagcattctgtgaaacttctttgtgatgtgtgcattcatctcacagagttgaacatttcttttgattgaacagttttgaaacactgtttttgtagaatctgcaatggacatttggagggctttgaagcctatggtggaaaaggaagtaacttcccataaaaactagacagaatctttcttagaaaattctttctgatgtgtgcattcatctcacatagttgaacatttcttttgattaagcagctttgaaacactctttttgtagaatctgtaagtggatatttggagtactttgagggtgatggtcaataatgaaatatcttcacttaataactagacagaagcattctgtgaaactactttgtgatgtgtgcattcatctcatagagttgaacatttcttttgattaagctgctttgaaacactcttttctagaatctgcaagtggatatttggagcgctgtgagacctatggtggaaaaggaaatatcttcacataaaaactatacagaaacattctgacaaatttctttgcgattgatgtattcatgtcacagaattgaaccttccttttaattgagcagttttgaaacactctttttgtagaatcggcaagtggatatttggagagctttgaggcctatggtggaaaaggaaatatctttacataaaaactagacagaagcattctgagaaacttgtttgtgatctgtgcattcatctcacagagttgaacctttcttttgattcagaagtttggaaacactctttttgtagattctgcaagtgaacatttggagctctttgaggtctatggttgaaaaggaaatatcttcacacacaaaaaagacagaagcattctgtcaaactactttgtgatatgtgcattcatatcacggagttgcaccttatttttgattgagaatttttgaaacaccctttttgtactatctgcaagtggacatttggagtgctttgaggcctatggtggaaaaggaaatatcttcacataaaaactagacagaaacattctgacaactttctttgtgatgtgtgcattcatctcacagagctgaacctttcctttgattgagtagtttggaaactctcttcttgttgatctgcaagtggacatttggagtgctttgaggcctgtggtgaaaaggaaatatcttcacataaaaactagacagaagctttctgagcaacttctttgtgatgtgtgcattcatctcacagagttgaacatttctttgtattgagcaggtttgaatcactctttttgtagaatctgcaagtggacatttggagagctttgtggcctatggtggaaaaggaaatatctttccataaaaactagatataatcatcctgagaaaattctttgtgatgtatgtattcatcagagagagttgaacctttttttcattgagcagttttgaaacactctttctgtagaatctgcaagcagacatttggagtgatttgaggcctaaggtgaaaaatgaaatatcttcacataataactagacagaagcattctgagaaagttgtttgtgatgaatgcatgaatctcacagagttgaacatttcttttgattgagcagctttgaaacactctttttgtagaatctgcaagtggacatttggaacacttcaaggcctatggtggaaaaggaaatatcttcatagagaagctagacagaaatattctgagaaatttctttgtgatgtgggcattcatctcacagagttgaaatttcttttgattgagcagttttgaaacactctttttgtagaatctgcaagtggatatttggagcgcttcgtggcatatggtggaaaaggaagtatcttcacttaaatactagacagaagaattctgacaaacttctttgtgatgtgtgcattcatctcaaggaattgaaacttacttttgattgagaagttttgaagcccactttttgtagaatgtgcaacttgatatttggagcacttttaggccttaagtggaaaagaaaatatcttcacataagaactagacagaagcattctgagaaacttctttgtgatgtgtgcagtcatctgacagagttgaacatttcttttgatttagcacctttgaaacattatttttgtaggatctgaatgtggacctttggagcgccttgaggcctatggtagaaaaggaaatatcttcacataaaaactatacagaagcatgctgacaaacttatttgtgttgtttgcattcatctcacagaattgaacgtttctttccattgagcagttttgaaacactgtttttgtgcaatctgcaagtggacatttggagcgctttgaggcctatggtggaaaaggaaatatcttcacttaagaactagacagaacattctgagaaacttcttctttgtgatgtgtgcattcatctcacagagttgaaccttccttttgattgagcagttttggaacactctttttgtagaatctgcaagtggacatttggagagctttgcagccaattgtggaaaaggaaatatcttcacataacaacaagacagcagcattctcagaaacttctttgtgatgtgtgcattcatcttacagagttgaaactttcttttgattgagcagctttgaaacactcttttgtagaatctgcaagtggacattaggagcgctttgaggcctgtggcagaaaaagaaatatcttcacataaaaacttgacagaagcattgtcacaaacttctttggaatgtgtgctttcatgtcacagagttgaacatttcttttcattaatctattttgaaacactcttttggtagaatctgcaagtgaacatttggaattctttgaggcctacggtggaaaaggaaatatcttcacagaaaaactacacagaagtattctgggaaatttctttgggatgtgtgcatgcatctcacagagttgaactttcttttgattgagcagtttgaaacactctctttgtagaatctgcaaagggacctttggagcactttgtggcatatggtggtaaaggaaatatcttcacataaaaactagacagaagcatgttgacaaacttctttgtgtcgtttgcattcatctcacagaattgaacctttctttccattgagcagttttgaaacactgtttttgtacaatctgcaagtggacatttggagcactttgaggcctatagtggaaaaggaaatatcttcacttaagaactagacagaacattctgagaaacctctttgtgatgtgtgcattcatctcacagagttgaacatttattttcaatgagcagttttgaaacactctttttgtagaatctacaagtggacacttggtgcgctttgaggcctatggtggaaaaggaaatatcttctcataaaacacggacagaaacattctgagaaacttcttcatgatgtgtatattcatctcaaagatttgaacctttcttttgattgaacagtttggaaacactctttttgcactatctgcaagtggacatttggagggctctgaggcctctggtggaaaaggaaatatcttcacttaagaactgcaaagaatcattctgagaaaatactttgtgatgtgtgcattcatctgacagagttgaaccttactgttgattgagcagatttgaaacatcctttttgtactatctacaagtggacatttggagtgcgttgatacctatggtataaaagtatatatctttacataaaaactagacagaaggattcttagaaatgtctttgttatatgtgcattcatctcacagagttgaaactttcttttgattgactagtttggaaaatctttttgaaggatctgcaagtggacatttggatcactttgaggcctatggtgcaaaaggaaatatcttcacataagaagtagacagaaacactctctttttatagaatctctaagtggacatttggagtgctttgcaacctatgctggaaaaggaaatatcttcacattaaaactagatagaagaattttgagaaacttctttgtgatgtgtgcgttcatctcacagagttaaaccttatttatgattgagcagtttggaaacacaatttttgtagaaactgcaagtttatatttggagagctttgtgggctatgctagaaaaggaaatatcttcacataaaaactagacagaagaattctgacagacttctttgtgatgtttgcgttcatctcacagagtggaatctttcttttgatagagcagttttgaaactctctttttgtagaatgtgcaagtggacatttggatcactttgtggcctacggtggaaaaggaaatatcttcacgtaaaaactagacagaagaattcagacaaacttctttgtgatgtgtgcattcatctcacagaattgagcctttcttttgattgagcagtttggaatcactctttttgtagaatctgcaagtggacatttggagtgctttgcggcctattttagaaaaggaaatatcttcacataaaatctagacagaagaaatctgagaaacttctttgtgatgtgtgcatgcatctcactgagttaaaccattctttcaattgagcagttttgaaactctctttttgtagaatctgcaagtggacatttggagcgctttgaggcgtatggtggaaaaggaaatatcttcacattaagactagacagaagaattctgacaaacttcttcgagatgtgtgcgttcatctcacagagttaaacctttcttttgattgagcagtttggaaacactctttttgtatcatccacaaggggacatttggaacgctttgcagattatggtaggaaaggaaataacttcatatgaaatctggacagaagcaatctgagaaactattttgtgatgtgtgcattcatctcacagagttaaacctttcttttgactgagcagttttgaaactctcgttttgtataatctgcaagtggacatttggaatgctttgaagtctatggaggaaaaggaaatatcttcatataaaaaccagacagaagaattctgagaaacttctttgtgatgtgtgcgttcatctcacagagttgaactttgttttgattaagcagtttggaaactctcttttagtagaatctgcaagtggacatttggagcggtttgtggccgatggtagaaaagaaaatatcttcacataaaatgtagacagaagcaatctgagaaactactttgtgatgtttacattcatctcatagaggtaaagctttcttttgattgagtcgttttgaaactctctttttgaagaatctgcatgtggacatctagagcacttgaggcctatggtggaaaagaaaatatctgcatataaaaactagacagaagaattctgagaaactcctttgtgatgtgtgcgttcatctcgcagagttgaacctttattttgatagagcagtttggaaacacactttttgtagaatctgcaagttgacatttggagcgcgttgtggcctatggtagaaaagtaaatatcttcacataaaatctaatagaagaaatctgagaaacgtctttttgatgtgtgcattcaactcacagagtgagagatttcttttgatggggcggtttggaaactctatttttgtagaatctgcaagtggatattttgagcgctttacagcctatggtggaaaaggaaatatcttcacataaaaacgagacagaaaaattctgagaaacttttttgtgatgcgtgcgttcatctcagagaattgaacttttcttttggttgaccaggttggaaacaccctttttgtagaatctgcaagtggacatttggagcactttgtggcctttggtagaaaatgaaatgtcttcacataaaatctagacagaagcaatctgagaaacttctttgtgatgtgtacgtttatctcccagagttgaacatttctattcatggatcagttttgacatacgctttttgtagaatctgcaagtggagatttcgagtgccttgagacctatggtggaaaatgaaatatcttcatataaaaactagacagaaaaattctgagaaacgtctttgtgatacgtgggttcatctcacagagttgaaactttcttttgattgagcagtttggaaacatgatttttgtagaatctgcaactggacatttggagcgctttgcggcctatggcagaaaaggaaatatcttcacataaaatctagacaaaagcaatctgagaaacttcttgtgatgtgtgcattcatctcacagtgttaaaactttcttttgattgagcatttttgagactctcttttgtagaatctgcaagtggacatttggagccctttgaggcctgtggtggaaaaggaaatatcttcacataaaaaccagacagaagaattctgagaaacttctttgtgatgtgtccatttatttcacagggttgaacctttcttttgattgagcagtttagaaacactctttttggagaatctgcaagtggacattggagcgctttgaggcctatggtggaaaaggaaatatcttcacataaaatctagacagaagcaatctgagaaacttctttctgatgtttgcgttcatctcacatgtttaaccctttcttttgattgagcagttttgaaactctctttttgtagaatctgtaagtggacatttgcagcgctttgaggcctatggtggaaaatgaaatatcttcacataaaaactagacagaagatttctgagaaactccttgtgatgcgtgctttcatctcacagagttgaacctttcttttgattgagcagtttgcaaaacaagctttttgtacaatctgcaagtggacatatggagcgcttcgtggcctatggtagaaaaggaaataacttcacataaaatctagacagaagaaatctgagaaacttctttgtgatgtgtgcattcatctcacagagttaaacctttctactgattgaggaattttgaaactctcttcttgtagaatctgcaagtggacatttggaggaatttgacgcctatgttggaaaaggaaatatcttcacaaaaaaaaaatgagatagaagtattctcagaaacttctttgtgatgcttgcattcatgtccctgagttgaaactttctttggtggacaagttttgaaatactctttttgtagaatctgcaagtggacatttcgagtgccttgaggcctatggtggaaaatgaaatatcttcacataaaaaccagacagaagaattctgagaaacttctttgtgatgtgtgtgttcatctcacagagttgaacctttcttctaattgagcagtttggaaacactctttttgtagaatcttcaagtggacatttggagtgctttgcagcctatggtagaaaaggaaatatctttacataatatctagacagaagcaatctgagaaacatctttgtgatgtgtgcattcatctcacagagtaaaaccttccttttaatggagcaattttgagtctccctttttgtacaaactgcaagtggacatttggagcgctttgaggcctgtggtggaaaaggaaatatcttcacataaaaactagatggaagaattctgagaaactcctttgtgatgtgtgcgttcatctcacagaattgaaccttacttttgattgagcggtttgggaacactctttttgtagaatctgcaagtggacatttggaacgctttgtgagctatggtagacaaggaaatatcttcacataaaatctagacagaagcaacctgacaaacttctttgtgatgtgtgcattcatctcacagagttgaatctttcttttcatagagcagttttgaaactctcttttgtaaaatctgcaagtggacatttgaagtgttttgaggcatatggtggttaacgaaatatctttacataataactggacaaaaacattctgagaaacttctttgtgatgtgtgtgttcatctctcagagttaaacatttcttttgattgagcagttttgaaactctctttttgaagaatcttcaagtggacatttggagggcttcactgcctgtggtagaaaaggaagtttcttcacataaaatctagacagcagctatctgagaaacttctttgtgatgcctgcattcatttcacagaattgaacatttcttttgactgagcagtttggaaacaccctttttttagaagctgcaattggacatttgaagagctttgcggcctatggtagaaaaggaaataccttcacataaaatctaggcagaatcagtctgagaaacatctttgttatgtctgcattcatctcagagagttaaacctttcttttgaatgagctgttttgaaactctctttttgtagaaactgcaagtggatatttgaagtgctttgaggcctatagtggaaaaggaaatatcttcacataaaaactagacagaagaattctgagaaacttctttgtgatacgtgtgtattcatctcacagagttgaaactttcttttgattgagcagttaggaaacactctttttccagaatctgcaaggggacatttggagtgctttgtgtcctatggtagaaaaggaaacatctttacataatatctagacagaagcagtctgagatacttctttgtgatgtgtgcattcatctcacagagttaaacgtttcttttgatagagcagtttagaaactctctttttgtggaatctgcaagtggacatttggaggacttttgggcctgtggtggaaaaggaaatatcttcacataaaaattagacagaagcattcttagaaacatctttgtgatgtgtgcattcaactcacagagttaaacttttcttttgatagagcaggtttgaaacactctttttgcagaatctgcaagtggacatttggagagatttgaaggctatggtggaaaaacaaatatcttcccataaaaactagacagaagcattctcagaaacttctgtgtgctgtttgcattcaactcagagacttgaacatactttataatagagcagttttgaaacactcttttagtagaatctgcaagtggatatttggaccgctttgaggccttcgttggaaatgggaatatcttcacataatcactagatagaagtttctctgaaacttcttttttctgtgcgcattcaactcacagagttgatcctttcttttgacagggcagatttgaaacactttttttatagaatctgcaagtggacatttggagcgctttgaggcctatggtggaaaaacaaatatcttcccacaaaaactagagagaagcattctcagaaacttctttgtgatgtttgccttcaactcatggagttgaacataccttatgatagagtagttttgaaacactcttttagtaggatctgcaagtggatatttggatcgctttgaagccttcgttggaaatgggaatatcttcacataaaaactgacagcagcatcctcagaaacttcttgtgatgtgtacattcaactcatagagttgaaactttctttttatggaacagttttgaaacactctttttgtagaatccgtaagtggatatttggaatgcgttgaggcattcgttggaaacgggaatatcttcacataaacattagacagaagttttctccgaaacttctttggctatgtacattcaactcacagagttgaacctttcttttgatagaacaggtttcaaacactctttttgtagtatctgcaagtgaacattctgagcgctttgaggcctatggtggaaaaggaaatatcttcacataaaaactagacagaagcattctcagaaacttctttgtgatggtgatgtatgcatccaactcacagagttgaacctttcttttgatagagcaggtttgaaacactgtttttgcagaatctgcattggacattcggatccctttgagacctatgttggaaaaggaagtatcttcacataaaaactagacagaaccattttcagaaacttctttgtgatgtttgcattcaactcactgagttgaacctttcttttgatagagcaggtttgaaacactctttttgtagaatctgcaagtggacatttggagcgctttgaggcctatggtgggaaaggaaatatcttcacatgaaaactagacagaagaattctgagaaacttctttgtgatgtgtgcgttcttctcacagagttgaaacttccttttgattgagcagtttacagacactctttttgtagaatctgcaattgggcattaggagcgctttgcgacctatgttataaaaggaaatatcttcacataaaatctagacagaaccaatgtgagaaacctctttgtgatgtgtgtattcatctcacagagttaaacctttcttttgatcgagcagttttgaacctctttttttgtagaatctgcaagtggacatttggagtgctttgaggcctatggtggaaaaggaaatatcttcacataaaaactaaagagaagagttctgagaaacttctttgtgatgtgtgcgttcatctcacagagttgaacctttcttttgattgagaattacggaaaaactctttttgtagattctgtaagtggacatttgaagcgctttgcagcctaagttagaaaaggaaatatcttcacataaaatctagacagaagcattctcagaaacttctttgtgatgtttgcattcaactcacagagttgaacctttcttttgatagagcagttttgaaactctctttttgttgaatgtggaagtggacatttggagcgctttgaggcttatggtggaaaaggaaatatcttcacatagaaactagacagaagcattctcagaaacttctttgtgatgtttgcattctactcacagagttgaatattcattttcatggggcagttttgaaacactcttgttgtagaatatgctagtggatatttggactgctttgaggccttcgttggaaacgggaatatcttcacctaaaaactagacagaatcattctcagaaacttgtttgtaatgtgtgcattcacttcacagagttgaaactttcttttgatagagcagttttgaaacactctttttgtagaatctgcaagtggacacttggaacactttgaggcctatagtggaaaaggaaatatcttcccatctaaactagagagaagcattctcagaaacttctttttgatgtttgccttcaactcacagagtggaacataccttatcatagagtcgttttgaaacactcctttagtagaatctgcaagtggatattaggtaccccttgaggccctccttggaaacgggaatatcttcacataaaatctagacagcagcatcctcagaaacttctttgtgatgtgtacattcaactcacagagttaaaccattcttttgattgagaagttctgaaacactctttttgtagaatctgctagtggacatttgtagcgcttttgggcatatagtggaaaaggaaatatcttcacataaaaactagacagaagtattctcagaatcttctttgtgatgtgtgccttcaactcaaatagttgaaagtttattttgattcagcagtttggaaacactctttttggagattctgcaagtggacatttgcagcgctatgaggactatggtagaaaaggtaatatcttcaaaaaaatctagacagaaggaatctgagaaacttctttggcatgtgtgcattcatctcacagagttcaaactttcttttgactgagcagttttgaaactctgtttttgtagaatttgcaagtggacatttggatcattttgaggcctatggtggaaaaggaaatatcttcacataaaaacttgacagaagaattctgagaatctcctttgtgatgtatcagtttatctcacaaatttgaaccttccttttgattgagcagtttagaaacattctttttgtagaatctgcaagtggactattggagtgctttgttgcctatggtagaaaaggaaatatcttcacataaaatctagacagaagcaatctcagaaacttctttgtgatgtgtgcattcatctcagagagttaaacctttcttttggttgagtagttttgaagctctctttttgtagaatctgcaagtggacattttgagtgctttgaggcctacagtgggaaaggaaatatcttcacataaaaactagacagaagaattttgagaaacttctttgtgatgtgcacgttcttctcacagagttaaaacttccttttgattgagcagtttgcagacactctttttgtagaatctgcaagtggactattggagtgctttgttgcctctgttataaaaggaaatatcttcacataaaatctagacagaaccaatgtgagaaacctctttgtgatgtgtgcattcatctcacagagttaaagcattcttttgattgagcagttttgaaactctttttttgtagaatctgcaagtgaacatttggagtgcttttaggcctatggtggaaaaggaaatatcttcacataaaaactagagacaagaattctgagaaacttctttgtgatgtgtgcgttcatctcacagagttgaacctttcttttgattaagaattatggaagcactctttttgtagattctgtaagtgggcatttgaagcgctttgcagcctaagttagaaaaggaaatatcctcacataaaatctagacagaagcaatgtgagaaacttccttgggatgtgtgcattcatctcacagggttaactcttacttttgattgagcagttttgaaactctctttttgttgaatgtggaagtggacatttggagcgctttgaggcttatggtggaaaaggaaatatcttcacatagaaactagacagaagcactcttagaaacttctttgtgatgtgtgcactgatctcacagagttaagcctttgttttgattgagcagttttgaatctctctttttgtagaatctgcaagttaacatttggagcgctttgaggcctgtggaggaaaaggaaatattttgacatcaaaactacacagaagaattcggagaagcttctttgtgatgcatgcgtttatctcacagagttgaacctttcttttgattgagcagtttggaaacactctttttgtggaatctgcaagtggacatttggagcgctttgcagcctatgttagaaaaggaaatatattaccataaaatctagataatatgaatctgagaaacttctttgtgatgtgtgcattcatctcacagagttaaaactttcttttgattgagctgtcttgaaactctcttattgtaaaatctgcaagtggacatttggagcgctttgaggcctatggtggaaaagtaaatattttcacatagaaactagacagaaaaattctgagaaacttctttgtgatgtgtgcttacatctcacagagttgaacctttctttagattgagcagtttggaagcactctttttgtagaatctgcaagcggtcatttggagcgctttgcgacctctggtagaaaaggaaatatcttcacagaaaatctagataaaagcagtctgacaaacttctttatgatgtgtgcattcatctcacagagttaaacatttattttgattaagcagttttgaaactctctttttgtagaatctgccagtgtacatttggagcgctttgaggcctatggtgtaaaaggaaacatcttcagataaaaactacacagaataattctgagaaacttctttgtgatgtgtgcattcatctcacagagttgaaactttcttttgattaagcagtttggaatcactctttttgtagaatctgcaagtggacatttggagcactttgtcgcctacgttagaaaaggatatatattaaaataaaatctagacagaagcaatctgaaaaacttctttgtgatgtgtgcatgcatctcacagagttaaaactttcttttgatggagctgtcttgaaactccctttttgtaaaatctgcaagtggacatttggagcgccatgaggcctatgatggaaaaggaaatatcttcacataaaaagtagacagcagaattctgagaaactactttgtgatgtgtgtgttcatatgacagggttgaactttacttttgattgagcagtttggaaagactctttttgtagaatttgcaactggacatttggagcgctttgtggcctatggtagaaaagaaaatatcttcacataaaatctagataaaagcaatctgacaaacttctttgtggtgtgtgcattcatctcacagagtaaacctttcttttgactgagcactttggaaactctctttttgtagaatctgcaagtggacattttgaaggctttgaggcctattgtggaaaaggaattatcttcaaatacaaactagacagaagaattatgacaaacttctttggatgtgtgcattcagctcacgaagttgaacatttcttttgatggagcagtttggaaacactctttttgaagaatctgcaagtggacctttggagctgtttgcagcctatggtggaaaaggaaatatcttcacataagatgtagacagaagtaatctgaaaaccttctttatgatgtgtgcattcatctcacagagttaaacgtttcttttgattgagcagtcttgaaactctctttttgtggaatctgcaagtggacatttggagcgctttgaggcctacggtggaaaaggaaatatcttcacataaaaaataaatagaagcatttttagaaacatctttgtgatgtgtgcattcatctaacggattgaaacctttcttttgatagagcagttttaaaactccctttttgtataatctctaaatggacatttgaagggcgttcaggcctatggtgaaaaatgaaatatcttcacataaaaagtacatagaagcattctgagaaactactttgtgatgtgtgcattcaacccccagatttgaacattcctttgaaggaccagttttgaaatactctttttgtagaatctgcaagtggacattttgagtgccttcgggtctacggtacgaaaggaaatatcttccataaaaactagaaagaagaattctgagaaagttctttatgatgtgcgcattcatctagaaagttgaacatttctttgaatgagcagtttggaaacactcttttggtagaatctgcaagtggacatttggagcgctctgaggcctatgttacaacaggaaatatcttcacataaattgtagacagaagcaatctgtgaaacttctttgtgatgtgtgcattcatctcaaagaggtaaagctttcttttgatagagcagatttgaaactctctttttgtagaatctgcaagtggacatttggagcgatttgatgcatgtggtggaaaagttaatatcttcatataaaaactagacagaagaattctgagaaacttctttgagatgtctgcgttcatctcacagagttgaaactttccttagattgagcagtttggaaacactctttttgtagaatctgcaagtggacatttggagagctttgcggccaatggtagaaaaggaaatatcttcacataaagtctagacagaagcaatctgagaaacttctttgtgatgtgtgcattcatcccacagaattaaaagtttcttttgatttagcagttttgaaactctctttttgtagaatctgcaactggacatttggagtgctttgtgccctatggtagaaaaggaaatatcttcatataaaatcttgacagaagcaatctgagaagcatctttgtgatatgtgcattcatcccagagagttaaaactttcttttgattgaggagtattgaaactctgtttttgtaaaatctgcaagtggacttttggagccctttgagtccaatggtggaaaaggaaatatcttcccataaaaaccagacagaagaattctgagaaacttctttgtgatgcgtgcattaatctcacagagttgaacctttcttttgattaagcagtttgcaaccactctttttgtcgaacctgcaagtggacatttggagggctttgtggcctatggaagaacaggaaatatcttcacataaaatctagacagaagcaatctcagaaacttctgtgtgttgtgtgcattcatctcacagagttaaaattttcttttgattgagcagtttggaaactctctttttgtaggatctgcaagtggacatttgcagtgctttgagttcaatggtggaaaaggaaatatcttcacataagaactagacagaagaattctgagaaacttctttgtgatgtgtgcgttcatctcacagagttgaacttttctttttattgagccgtttgaaaacactgtttttgtagaatctgcaagtggacatttgtagcactttggagccaatggtagaaaaggaaatatcttgacgtaaaatctacacagaagcaatctgggaaacttctttgtgatgtgcgcgctcatctcacaaagttaaacctttcttttgattgagcagttttgaaactctctttttgtagattctgcaagtgaacgtttggagcggtttgagacctacggtggaaaaggaaatatattcacataaaaactagatagaatcaatatgagaaactactttgtgatatgtgcgttcatctcccagatttgaatctttcttttgatgggccagttatttattactctttttgtggaatctgcaagtggacatttcaagccccttgaggcctactgtggaaaatgaaatacattcacataaaaactagacagaagaaaactgagaaacatctatgtgacgtgtgcgttcatcttacagagttaaactttttttgatcgagcagtttggaaacactttttgaacaatctgcaagtcgacatttgaagctctttgagaactgtggtggaaaaggaaatatcttcacataaaaactagacagaagaatactgtgaaatcactttgtgatgcgtgcgttcatcacacagagttgaaagtttcttttcattgggctgtttggaaacactctttttgcagaatctacatgtggacaattttagcgctttgcggcctatggtagaaaaggaaatatcttcacataaaatctagacagaagcaatctgacaaacttctttgtgatgtgttcattcatctcacagagttaaacctttctttttattgagcagttttgaaactctctttttgtagtatctgcaagtggacatttggagcccttttaggcctgtggtagaaaaggaaatctcttcacataaaaactagacagaagaattctgaaaaacttctttgtgatgcgtgctttcatctcccacagttgaaactttattttgatacagcaggttggaaacactcttttgtagaatctgcaagtgcacattcggagcgctttgtggcctgtagtagaaaaggaaatatcttcacataaagtctagactgaagcaatctgagaaacttctttgtgatgtgtgcattcatctcatggagttaaacttttcttttgattgagcagtcttgaagctctctttttgtagaatccgcaagtggatatttggagctctttgaggccaacagtggaaaaggaaatatctgcacataaaaactagacagaagaattctgagaaactactttgggacgtgtgcattcatctcacagatttgaacctatcttttgattgaaccgtttggaaacactctttctgtagaatatgcaagtggacatttggagaactttgtggcatatggtagaaaaggaaatatcctcacataaaatctagacagaagccatctgagaaacttctttgtgatgtgtgcatttatctcacagagttaaaccttttttttgattgagcagtttggaaacactctttttgtagaatctcgaagtggacatttggagcgcttagaggcctatggtggaaaaggaaatatcttcacataaaaactagacagaagaattctgataatcttctttgcgatgtgtgcgttcatctcacaaagctgaaattttcttttgattgagcagtttggaaacactctttttgtagaatctgcaagtggacatttgcaatgctttgcggcctatggttgaaacagaaatatcttcacataaaacctagagagaaacaatctgagaaacttctttgtgatgtgtgcattcatctcacagagttaaacctttcttttgattgagcggttttgaaactctcttttcatagaatctgcaagtggacatttggagcgctttgaggcctgtggtggaaaaggtaatatcttcacataaaaactagacagaagaattctgacaaacttcttgggaatgtgtgcgttcatctcacagacttgaacctttcttttgattgagcagtttggaaacactcttttttgtagaatctgcaaatggacatttgaagcgctttgcgacctatggtagaaaaagtaacaccttcacataaaatctagagagaagcaatcggagaaacttcttagtgatgggtgcattcatctcacagagtttaaactttcttttgattcagcagttttgaaactctctttttgtagaatctgcaagtggacatttggaacgctttgaggcctatggtggaaaaggaaatatcttcacataaaaactagaaagaagaattctgacaaacttctttgtgatgtgtgcgttcttctcacagagtggaaccgttcttttgattgagcagtttggtaccactctttcttgtagagtctgcaggtgggcatttggagagctttgccgtctatggtagaaaagtaaatatcttcacataaaatctacacagaagcaatatgagaaacttgtttgtgatatatgcattcatctcacagagataaccctttcttttgattgagcagttttgaaactctctttttgtagaatctgcaagccgacatttagagcgtcttgaggcctatgatggaacaggaaatatcttcacataaaaattagacagaagaattctgagaaacttctttgtgatgagtgtgttcatctcacagagttgaacatttcttttgattgagtagtttggaaacactctttttttgtagaatctgcaagtggacatttggaactctttgcggccaatggtagaaaaggaaatatcttcacataaaatctagacagaagcaatctgagaaacttctttgtgatgcgtgcattaatctcacagagttaaacctttcttttgattgagcagattggaaactctctttttgtagaacctgcaagtggacatttggcagcgctttgaggcctgtggtggagaaggaaatatcttcacataaaaagtagatagaagcattctgagaaagttctctgtgatgtctgcactcatctcctggagttccaactttctttaggagaaccagttttcaaatactctttttggagaatctgcaaggggacatttcaagcaccttgaggcttaagttggaaaaggaaatatgttcacaaaaaaaacagaagaattctgagaatcttttttatgatgtgtacgttcatctaacagagttgaacctttcttttgattgcgtagtttgggaacaccctttttgtagaatcggcaagtggacatttggagcactttgcggcctatgatagaaaaggaaatatcttcacataaaatctagaaggaagcaatctgagaaactcctttgtgatgtgtgcattcatctcacagagttgaaactttcttttgattgagcagttttgaaacactctcttcgtgaaatctgcaattggatatttggagccctttgaggcctactgtggaaaaggaaatatcttcacataaaaactactcagaagcattctgagaaacaccattgtgatgtttgcattcaactcacagagttgaaactatgttttgattgagcagttttgaatctctctttctgcagaaactacaagtgtatgtttggaaagctttgaggcctattgtggaaaaggaaatatcttcacataaaaactacacagaagcattctgagaaactactttgtgaggtgtgcattcaactcacagagttgaaattatcttctctttgaggagtttccaatctctctttttgtagaatctgcaagtggatatttgaagatctttgcaccctatggtggaaaaggaaatatcttgaaataaaaactacacagaagcattcagagaaacttctttgtgatatgtgcattcaactcacagagttgaacctatcttttgattgagcagttttgaatctctctttatgcacaatctgaaggtggatatttcgagccctttgaggcctacagtggaaaagcaaatatcttcacataaaaactatgcagaagcattgtgagaaactactttgtgaggtgtgcattcaactcacagagttgaacttatcttctcattgagcagttttgaatttatcttttggtagaatctccaagtggatatttggagccctttgcgccctatggtggaaaaggaaatatcttcaaataaaaactacacagaatcactcagagaaactgctttgtgatgtgtgcattcatctcacagggttgaacctagcttatgattgagcagttttgaaatactctttttgtaggatcttcaagtggatatttggagcgctttgaggcctacagtggaaaactaaatatcttcaaataagaactacacagaagcattctgagaaacttctttgtgatgtgtgcattcatctcactgagttcaacctttcttttcattgcgcagttttgaaacaccgtttttgtagaatctgcaagtggatatttggagaactttgccgcctattgtggaaaaggaaacatcttcacataaaaactactcagaagcattctgagaaacttctttgtgatgtgggcattaaactcacaaagttgaacctatcttttgattgagcagtttagagtctctctttttctataatctacaagtggatatttggagccctttgcgccctatggtggaaaaggaaatatcttcaataaaaactacacagaagcattctaagaaacttcttcgtgatgtgtacagtcaactcactgagttgaacttatcttctcaatgagcagttttgaatctctgtttttgtagattctgcaagtggatatttagagccctttgtgccctatcatggaaaaggaattatcttcaaatagaactacacagaaccatccagagaaacttctttctgatgtatgcattcaactcacagagttgaacctatcttttgattgagcagttttgaatacctctttttgaagaatctgcaggtggatatttggagccttttgaggcctgctgtggaaaatcaaatatgttcacataaaaactatacagaaagattctgagaaacttctttgtgatgtgtgcattcaactcagagagttgaacctatcttttgattgagcagttttgaatctctctttttgtagaatctgcaagtggatattaggagccctttgtgccctatggtggaaaaggaaatatcttcaaataaaaactacatagaagcattcagagaaactgctttgtgatgtgtgcattcaactcacagaggtgaacttatcttttgtttgagcagttttgaatctctctttatgcagaatctgcaggtggatatttggagaccatcgaggccttctgtggaaaaggaaataacttcaaataaaaactatacagaagcattctcagaaacttcttcatgatgtatgcattcaactcacagagttgaacctatcttttgattgaacagttttgaatctctctttttgcacaatctgcaagtggatgtttggagcgtcgtgaggcctactgtggaaaatcaaatatgttcacataaaaactaaacagaagcattctgagaaacttctttgtgatgtgtgcattcaactcacagagttgaacctatctttcgatggagcagttttgaatctctcttttttcaggatctgtaagtggatgtttggagagctttgaggactattgtggaaaaggaaatatcttcacataaaaactacacagaatcattctgagaaacttctttgtgaggtgtgcattcaactcacagagttgatcttatcttctcattgagcagttttgaatctctctttttgtagaatctgcaagtggatatttggagccctttcagccctgcagtggaaaaggaaatatcttgaaataaaaactacacagaagcattcagacacacttctttgtgatgtgtgcattcaactcacagagtcgaaagtatcttttgattgagcagttttgaatctctctttttgcagaatctgcaggtggatatttggagccctttgaggcctactgtggaaaagcaaatatcctcacatgaaaattacacagaagcattctgagaaactacttcgtgacgtgtgaattcatctcacagggatgagtttatctcatgattgagcagttttgaaacactctttttgtagaatatggaagtggatatttgtaccgctttgaggccttcgttggaaatgggaacatcttcacataaacactcgacagaagcattctcagaaacttctttgtgatgtgtgcattcaactcacagagttgaacgtttattagatagagcacgtttgaaacactcattttgtagaatctgcaagtggacatttggagagctttgaggactatggtgggaaaggaaatatcttcacatcaaaactagacagaagcatactcagaaacttctttatgaagtttgcattaaactcacagagttgaactttcattttcatagaccagttttgaaacactcttttcatagtatctgcaagtggatatttggactgctttgaggacttcattggaaacgggtataacttcacataaacattagacagaagcattctcagaaacttctttgtgatgtgtgcattcaagtcacagagttgaacataccttatcatagagtagttctgaaaccctcttttagtggaatctgcaagtggatatttggactgcattgaggccttctttgaaaatgggagtatcttcacataaacactagacagaagcattctgagaaacttctttgtgatgtgtgcattcaactcacagagttgaacttttcttttgatagagcaggtttgaaacactctttttgtagaacctgcaagtggacatttggagagatttgaggcctatggtggaaaaggaaatatcttccaataaaaaatagaaggattctcagaaacttctttgtgatgtttgcgtttgccttacagagttgaacacacgttatcatagagcagttttgaaacactctttgagtagaatcagcaagtggatatttggacccctttgaggccttcattggaaacgggaatatcttcacataaaaactagacagaagcattctcaggaacttctttgtgatgtgtgcattcaactcacagagttgaacctttcttttgatagaccaggtttgagacactctttttgtagaatttgcaagtggatatttggaaagctttgtggcctaccgtggaaaaggaaatatcatcaaataaaaactagacagaagcattctcagagacttgttcgtgatctttgcattcaactcacagagttgaacataccttatcatagaacagttttgaaagactcttttactagaatttgcaagaggatatttggagtgttttgagaccaacattggaaacgggaatatcttcacataaacactagacagaagcattctcagaaagttctttgtgatgtgtgcattcaactcacagagttgaacgttgcttttgatggagcagttttgacaaactctttttgtaaaatctgcaattggatatttgaagagctttgaggcctatggtcaaaaaggaaatatcttcacataaaagctacagagaagcattctcagaaacttcttggtgatgtgtgctttcaactcacagaattgaaccttgcttttgatagagcaggtttgaaacactctttttgtggaatctgcaagtgaatatttggaccactttgaggccttcattggaaacgggaatatcttcacataatcactagacagaagctttctcagaaacttctttgtgctgtgtgcattcagctcagagagtagaacctttcttttgatagagcaggtttgaaacacttttttcatggaatctgcatgtggatatttggaccgctttgaggccttcgttggaaacgagagtattttcacttaaacactagacagaagcattctcagaaactaatttgtgatgtgtgcattcaactcacagagttcaaccttcctttagataaagcacgtttgaaacactcattttgtagaatctggaagtggacgtttgaagaaatttgaggcctacagtgggaaaggaaatgtcatcacataaaaactagacagaagcattctcagaaacgtctttgagatgtgtgcattcaactcacagtggtgtaccttccttttcatagagcattttttaaacacacttttcgtagattctgcaagtggatatttggaccgctttgaggccttcgttagaaacgggaatatcttcacataaaaactagacagaagcatttcagaaacttctttgtgatgtgtgcattcaactcacagagttgaaactttcttttgatggagaaggtgttaaacactgtttttgtggaatataaaagtggacatttggtgcgctttgaggcctatggtggaaaaggaaatatcttcacataaaaaatagacagaatcattctcagaatcttgtttttgatggatgcattcaattcacagagttgaacatgctttattatagagcagttttgaaacactcttttgtagaatctgcaagtggatatttggaccactttaaggccttctttggaaaggggtatatcttcacataaacactagacagaagcattctcagaaacttcttcatactgtgtgcattcaactcggtgagttgaacctttcttttgatagagcagttttgaaacactctttttgaagaatctgcatgtggatatttggacggctttgagaccttctttggaaactgtaatatcttgacataaacactagacagaagcattctcagaaacttctttcggatgtgtgcattcaactcgcaaatttgaacgtaccttatcatggagtagttttgaaactctcttttagtggaatctgcaagtggatatttggaccgctttgaggtcttcgttggaaacaggaatatcttcacataaacactagacagaagcattctcagaaatttcttattgatgtgtgcattcaactcacagagttgatcttttcttttgacagagcaggtttgaaacactctttttgtagattctgcaagtggacatttggagagatttgaggcctgtggtggaaaaggaaatatcttcatataaaaactagacagaagaactctccaaaacatctttgtgatgtttgcattcaattcacagagttgaacatatcttttcatagagcagttttgaaacactcttttcgtagaatctgcaagtggatatttggaatgctttgaggcttacgtgggaaacggaaatatcttcacataaaaactagacagaagcattctcagaaacttctttgtaatgtgtgcgttcaactcacagagttgaaactatctatatagagcaggtttgaaacactctttttgtagaatctgcaagtggacatttgcagcactttgattcctatcgtggaaaaggtaatatcatcacataaagactagactgtagctttctcagaaacttctttgtgatgtatgcattcaactcacagagttgaaaatacctcttcatagcgcaatttagaaactctctttttgtagaatgtgcaagttgatatttggaactctgtgaggtcttcgttggaaaccgggaataacttcacataaaaactagacagaagcattctcacaaacttctttgtgatgtgtgcattaaactcacagatttggaccttgcttttgatagaacagatttgaaacactctttttttagaatctgcacgtgggcatttggagcactttgaggcctatggtggaaaaggaaatatcttcacataaaaactacacagaagcattctcagaaacttcttcgtgatgtgtgcattcacctcagagagttgaacatttcttttgatagagcagttttgaaacactctttttgtaaaatctgcaagtggatagatggaatgctttgcggccttcgttggaaacgggagtatcttcacataatcactagacagaagctttctcagaaacttttttgtgctgtgacattcaagtaagggagttgaacctttattttgaaagagcaggtttgaaacactctttttgtggagtctgcaagtggacatttggagagttttgaggcctatggtggaaaaggaaatatcttcacgtaaaaactacacagaagcattctcagaaacttctttgtgatatttgtattcaactcacagagttgaactttctttgatagagcagttttgaaccaatctttttgaagaaactgcaaatggatattaggacagctttgaggccttcgttgaaaacgggaatgtctttacataaacactagacagaagcattcccagaaacttctctgtgatgtgtgtattcaattcacagagttgaacctttcttttgatagagcaggtttgaaacaatctttttggaggatctgaagtgaacttttggagagctttgaggcctatggtggaaaaagaagtatctttatataaaaagcaggcagaagaattctcataaaattctttgtgatcgtgcattcaactcacagattcgaacatacattttgatagagcagttttgaaacactcttttagtagaatctgcatgtggatatttttaccgctttgaggccttcgttggaaacgggaatatcttcacataaaaaatagaagcattctcagaaacttctttgtgatgtttgttttcaactcacagatttcaacgtaccttatcatagagtagctttgaaacactcttttagcagaatctgcacgtgcatatttggagagctttgaggcttgtcgtggaaaaggaaatatcatcatataaaaactagacagaagaatgctcagaaacatctttgtgatgtttgcattcaactcaaagagttgaacataccttttaataaagcagttttggaacactcttcgtggaatctgcaagtggatatttggaatgctttgaggccttcattggaaacgggaatatcttcacataaaaactagacagaagtattctcagaaaattctttagggtggttgcattcaacacacagagttgaacataccttgtcctagagcagttttgaaacactctttttgtagaatctgcaagtggatatttggaccgctttgaggctttcgttggaaacgggaatatcttcacataaacagtagacagaaggattctcagactcttctttgtaatgtgtgctttcaactcacagagtttaaccattcttttgatagagcaggtttgaaacactctttttgtaggatctgcaattcgacattttgagagctttgaagcctacggttcaaaaggaaatatcatcacataaaaagtagacagaagcattctcagaaactacattgtgatgtttgcattcaacacacagagttgaacataacttttcatggagcagttttgaaacactctttatgtagaagctgcaagtggatatttggatagctttcaggacttcgttggaaacgggaattcttcacataaaaactagagagaagcattctcagaaactagtttgtgaggtttgcattcaactcacagagttgaacatactttatcatagagcagttttgaaacactcttgtagtagaagctgcaagcggatatttggaccgctttgaggtcttcgttggaaacggcattatcttcacataatcactagacagatgctttctcaaaaacttctttgtactgagtgcattcaactcacagagttaaccttatttcatcgagcaggtatgaaacactctttttgtagaatctgcaactggacatttggagagctttgaggcctatggtggaaaaggaaatatcttcacacaaaaactagacagaagcagactcagaaacgtctttgtggtgtttgcattcaactcacaaagttgaagatacctttccatggagcagttttgagacactctttttgtagaatctgcaagtggatatttggaccgctatgaggccttcgttagaaatggaaatatcttctcataaacactagacagaagcattctcaaaaacttctttgtcatgcgtgcattcaactcaccgagttgaacatactttgtcatagagcagttttgaagcactcttttagtagaatctgcaagtggatatttggaccgctttgagaccttcattggaaacgggaatatcttcacataaaaactagacagatgcattctcagaaacttctttgtgatgtgtgtattcaacataaagatttgaacctttcttttaatagagcaggtttgaaacactctttttgtagaatctgcaagtggacatttggagagctttgaggcctatggtggaaaaggaattatcttctcataaaaactagacagaagcattctcagaaacaactttgtgatgtgttcattcaacacaaagagttgaaggtttcttttgatatagcaggtttgaaatactctttttgtagaatctgcaaatggacatttggagagctttgaggcctatggtggaaaaggaaatatcttcacacaaaaactagacagaagcattctcagaaacgtctttgtgatgtttgcattcaactcacaaagttgaagatacctttccatggagcagttttgagacactctttttgtagaatctgcaagtggatatttggaccgctatgaggccttcgttagaaatggaaatatcttctcataaacactagacagaagcattctcaaaaacttctttgtcatgcgtgcattaaactcaaagagttgaacctttcttttgatagagtagctttgaaatactcttttagtagaatctgcaagtggatatctggagagctttgaggcctatggtgtaaaaggttatatcttcatataaaaattagagagaagaattctcagaaacttctttgtgatgtttgcattcaactcagagttgaacgtaccttttcatagaacagttttgaaacactcttttcctagattctgcaagtggatatttggaacgctttgaggccttcgttggaaacgggattatgttcacacaaaaacgggcagaagcattctcagaaacatctttgtgatgtgtgcattcaactcaaagagttgaaactttcttttgatagagcatgtttgaaacactctttttgtagaatcggcaccggacatttttagagctatgaggcctatggtggaaaaggaaatatctttaaataaaaaccagacagaagaattctaaggaactacattgtgatgtttgcattcaactcatacagttgaacataccttttgatagagcagtgttgaaacactctttttgtagaatctgcaagtgaatatttggaccgctttgaggccttcattggaaatggaaatatcttcacataatcactagatagaagctttctcaaaaacttttttgtactgtgtgcattcaactcacggagttgtacctttcttttgatggagcaggtttgaaacactctttttccagaatctgcaagtggacatttggagtgctttgaggcctatggtggaaaaggaaatatcttcccataaaaaccagacagaagcattctcagaaagttcttatgatgtgtgcattcaattcacagagttgaacataccttatcatagagcacttttgaaacactcttttagtagaatctgagagtggatatttgcactgctttgaggccttccttggcaaggggattatcttcacataaacactagacagaagcattctcagcaactcctttgtgatgtgtgcattcaactcacagagttgaacctttcttttcatagagcaggtttgaaaccgtctttttgcagaatcttcaagtggacatatggcaagctttgaggcctacgatggaaaaggaaatatcattatataaaaaccagacagaataattctcaggaactactttgtgatgtttgctttcaaatcacagggttgaacatacctcttcatagagcagttttgaagcactctttttgcagaatctgcaagtggatatttggaatgctttgaagccttcgttggaaacgggaatatcttcaaataaacactagatagaagcatttcagaaacttctttgtgatgtgtgcattcaactcacagagttgaagctttcttttgatagagcaggtttgaaacactctttttgtagaatctgcaagtggatatttgaactactttgaggccttcattggaaaaggagatatcttcacataaacactagacagaatcgttctcagaaacttctttgtgatgtgtgcattccactcacagaattgaacctttcttttgatagagcaggtttgaaacactttttttgtagaatctgcaagttgactgttggagagctttgaggcctatggtggaaaaggaaatatctataaataaaaactagacagaagcattctcagaaacttctctgtgatgtttgcattcaactcacagagttaaacctcccttttcatagagcaattttgaaacactcttctcttataatctgcaagtggatatttggactgctttgaggccttcgttggaaacaggaatatcttcacataaaaactagacagaagcattctcagaaactacttttgatgtatgcattcaactcacagagttgaacctttcttttcatagagcagggttgaaacactctttttgcaggatctgcaagtggatatttggagctctttgaggcctatggtgaaaaaggatatatcttcacataaaaactagacggaagcattctcataaacttatttgtgatgtgtgcattcaactcacagagttgaacctttcttttgatagagcaggtttgaaacattcattttgtagaatctgaagtgcacatttggagagctttgaggcctatggtggaaaaggaagtatcttcacataaaaactagagagaagcgttctcagaaacttctttgtggtgtgtgcattcaactcacagagttgaacctctcttttcatagagcaggtttgaaacattcttttcttagtatctgcaagtggatatttggagagctttgagtcctatggtggaaaaggaaatatcttcacacaaaaactagacagaagcgttctcagaaacgtctttgtgatgtttgcattcaactcacagagttgaagatacctttccttggagcagtttttagacactctttttatagaatctgcaagcggatatttggaccgctatgaggccttcgttggaaacgggaatgtcttcacataaacactagacagaagcattctcaaaaacttctttttcaggcgtgcattaaactcaaagagttgaacctttcttttcatagagcagctttgaaacactctttttgtagaatctgcaagttgacatttggagagctttgaggcctatggtggaaaaggaattatcttcatataaaaataagagagaagaattctcagaaaattctttacgatgtttgcattcaactcacagatttgaagataccttttcatagagcagttttgaaacactctttttgtagaatatgcaagtggatatttgaaacgctttgaggccttagttggaaacgggaatatgttcacacaaaaacaggcagaagcattctcagaaacttctttgtgatgtgtgcattcaaccccaagagttgaaactttcttttcatagagcatgtttgaaacactctttttgtagaatctgcaagtggacatttggagagcattgaggcctatcgtggaaaagtaaatatctcacatataaactagagagaagcattctcagaaactactttgtgatgtgtgcattctactcacagagttgtacctttcttttgatagagcagttttgaaacactctttttgtagaatctgcaagtgaacatttggaccgctttgaggcctttgttggaaacgggaatatcttcacataatcactagacagaagctttctcaaaaacttttttgaactgtgtgcattcaactcacagagttgaacttttcttttgatagagcaggtttgaaacactctttttctagaatctgcaagtggacatttggagcgctttgaggcctatggtggaaaaggaaatatcttcccattaaaaactagacagaggcattctcagaaacttcttatgatgtgtgcattcaaatcacaaggttggacataccttatcatagagtacttttgaaacactctttttgtagaatctgcaagtggatatttgcactgctttgaggccttcattggcaacgggattatcttcacataaacactagacagaagcattctcaggaacttctttgtgatgtgtgcattcaactaacagagttgagcctttcttttcatagagcaggtttgaagccctctttttgtagaatcttcaagtggacaaatggcgagctttgaggcctatggtggaaaaggaaatatcattatataaaaaccagacagaagaattctcaggaactactttgtgatgtttgctttaaaatcacagggttgaacatacctcttcatagagcagttttgaagcactctttttgcagaatctgcaagtggatatttggaacgctttgaagccttcgttggaaacgggaatatcttcaaataaacactagatagaagcattctcagaaacttctttgtgatgtgtgcgttcaactcacagagttgaagctttcctttaataaagcaggtttgaaacactctttttgtagaatctgcaagtggatatttgaaccactttgaggccttcgttggaaaaggggatatcttcacataaacactagacagaatcattctcagaaacttctttgtgatgtgttcatttcactcacagaattgaacctttcttttgatagagcaggtttgaagcactttttttgtagaatctgcaagcagacatttggagagcttggaggtctatggtggaaaaggaaatatctataaataaaaactagacagaagcattgtcagaaacttctttgtgatgtttgcattcaactcacagagttgaacctcccttttcatagagtagttttgaaacactattttcgtagaatctgcaagtggatatttggaccgctttgaggccttcgttggaaacgggaatatcttcacataaaaactagacagaagcattctcagaaactactttgtgatgtgtccattcaactcacagagttgaaccttccttttcatagagcagggttgaaacactctttttgcaggatccgcaagtggacatttggagctctttttggcatatggtggaaaaggatatatcttcacataaaaactagacagaagcattctcataaacttatttgtgacgtttgcattcacctctcagagtctaacatactttatcatagagcagttttgaaacactcttttagtagtatctgcaagtggataattggagggctttgaggccttcattggaaacgggagtatctttatataatgatgctttctcagaaatttctttgtgctgtgtgtattcaactcacagagttgaacctttctttttatagagcaggtttgaaacactcttttgcggaatctacaagtggacattaggagcgctttgtggcctatggaggaaaaggaaatatcttcacataaaaactagacagaagcattctcataaacttatttgtgacgtttgcattcaactctcagagtttaacatactttatcatagatcagttttgaaacactcttttagtagtatctgcaagtgtataattggacggctttgaggctttcgttggaaacgggagtatcttcacacaatgaagctttctcaaaaacgtctttgtgctgtgtgcattcaactcacagatttgaaattttcttttgatggagcagatttgaaacactctttttgtagaatttgcaagtggatatttggacagctttgaggccttccctggaaacgggggtttcttcacataaaaactagacagaagcattctaggaaaattcagtttgatgtgtgcattcaactcagagagttgacccttctattgatagagcaggtttaatactctttttgcagaatctgcaagtggacattatgagcgatttgatgtctatggtggaaaaggaaatatcttcacattaaaactaaacagcagcattctcagaaacttctttgtgatgtttgccttcaattctcagagttgaacatactttatcctagagcagttttgaaacactcttttagtagtatctccaagtggttatttgggccactttgaggacatcattggaaacgggagtaccttcacatgatcacgacacagaagttttctcagaaacttcctttggctgtgtgcattcacctcacatatttgaatatttctttgatagagcaggtttgaaactctctttttgtagaatctgcaagttgacatttggagcgctttgaggcctatggtggaaaaggaaatatcttcgtataaaaactagacagaagcattctcagaaacttctttttgatatgtgtactcaactcacagagttaaactttgttttgatggagcagttttgaaacactcttcttgtagaattttcaagctggatatttggacagctttgaggctttcgctggaaacgggaatatcctcacataaaagccagacagaagcattcacagaaacttctttgtgatttgcgcattcaactcaaagagttgaatctttactttgttagagcagctttgaaacactctttttgcagaatttacaagtggatatttggacagctttgaagccttcgctggaaacgcgagtagcttcacataaaaactagacagaagcattctcagaaatttctttgtgatgtttccattcaactcacagagttgaacatgccttttcatagagcagttttgaaacacaccgtttgtagaatctgcaactggatatttggagctctttgaggcctatggtgaaaaaggaaatatcttcacataaaaactagagagaagcattctcagaaacttctttgtgatgagtgtattcaactcccagagttgaaccactcatttgatagagcagttttgaaacactatttttgtagaatttgcaagtggatattagacagctttgaggctttcattggaaacgggaatgtcttcatgtgaaaaatagaagcattctcagaatcttctttgcgatgtgtgcattcaacccacagtgttgaaactctattttgatatagcagattggaaacactctttttgtagaatttgcaagtggatatttgaacagctttgaggccttcactggaaacgggattatctccacataaaaaccagacagaaacattctcagaaacttctttgtaatgtgtgtactcaacttagaaaggtaaacctttcctttgatagagcagttttgaaacactattcttgtagaatttacaggtggatattaggacagctttgaggctttcattggaaacgggaatatcttcacattaaaaccagacagaagcattctcagaaacttctttgtgatgtgtgcattcaactcacagagttgaaatttcctttgataaagcagctttgaaacactctttttaaagaatttgcaagtggatatttggacagctttgaagccttcgctggaaacgggggtatcttcacataaaaactagacaaagcattctcagaaacttctttgtgatgtttgcattcaactaacagggttgaatattccttttcatagagaagtttgaaaaaatctttttgtagtatgtgcaagtagacatttggagcgcttgaggcctatggtgaaaaaggaaatattttcacataaaaactagacagaagcattctcagaaacttctttgtgaagtgtgcactcagctcacagagttaaaactttctttgatagagcagtcttgaaacacacttcttgtagaatttacaagtggatattaggacagctttcaggcttccgttggtaatcctgaagatattcgctggaatatcttcacatgaattgtagacagaagcattctcagaaacatctttgtgatgtgtgctgttggaactttcctttgatagagcagcttgaaacactctttttgtagaatttgcaagtggatattgggacagctttgaagtcttcgcaggaaacgggtttatcttcacataaaaactagacagaatcattctcagaaactcctttgtgatgtttgcgttcaactcacagagttgaacattccttttcatagagcagttttgaaaaacactttttgtagaatctgcaagtggacatttgcagcgttttggggcccactgtgaataaggaaatgtgttcacattaaaactagatagaagcattctcagaaacttctttgtgatgtgtttactcaacacacagatttgaatctttgttttgacagagcagtttgaaacccttttttgtataatctgcaagtggatatttggatatctttgaggctttcgtcggaaacgggaatatcttcacataaaaactagagagaagcattctcagaaacttctttgtgaagtttgccttcaaatcacagagttgaacattccttttcatagagcagttttgaaacactctttttgtaaaatctgaagtggacatttggagtgctttgaagcctattttggaaaatgaaatattttcacataaaaactagacagaggcattctcagaaacttctttgtgatgtgtgtactccactcacagagtagaacctttctttttatagagcagttttgaaacactctccttgtagaatctgcaaatggatatttggacagctttgaggctttggttggaaacgggaatatcttcacctaaaaaccagacagaagcattctcagaaacttctgtgtgatgtgcgcattcaactcacagaggtgaaactttctactgacagagcagcttttaaatactctttttgtagaatttgcaagtggatatttggacagctttcaagacttcactggaaacggaagtatcttcaggtaaaagctagacagaagcattctcagaaacttctttgtgatctttgcattaaactcacggagttgaacattccttttcatagaggagttttgaaaaactctttttgtagattctgcaagtggacatttggagcgctttgaggcctatgtttaaaaaggaaatatcttcccataaaaactagacagaagcattctcagaaacttctttgtgttgtgtgtattcaactcacagagttgaacctttattttgatagagcagatttgaaacactctttttgtagaatgtgcaagtggatattgggatagttttgaggctttcgttggaaacgggaatatcttcacataaaaactagacagaaacactctcagaaacttctttctgatgtgtgtcctcaactcacagagttgaacacttcttttgatctagaagttttgaaacactctctttgtagcatctgcaagtggacatttggtgtgcattgagacgtatggtgaaataggaaatatcttaacataaaaactggacagaagcattctcaaagacttctttgtgatgtttgcatttatctcacagatttgaacattccttttcatagagcagttttgaaacactctttttgtagcatctgcaagtggacattcagaacgcttggaggcctatggtgacaaaggaaatatcttcacataaaaactagacagaagcattctcagaaatttcttcacgatgtgtatactcaactcacagagatgaacctttcttttgctgtagcagttttgaaacactctttttgcagcatttacaagtggatatttggacagcttcgaggttttccttggaaaagggaatatcttcacataaaaactagaccgaagcattttcagaaacttctttgtgatgtgtgtattcaactcaaagagttgatactttcttttgatagagcagatttgaaacactctttttgtagaaattgcaagtggatatttggacagctttgtcgccttcgctggaaaccggggtatcttcacataaaaactagacggaagtattctcaaaaacatctttgtgatgtttacattcaactcacatagttgaacattcctttcaatagagcagtattgaaacactctgtttgtagtatctgctagtggacatttggagcacttttaggcctctggagaaaaaggaaatatcttcacataaaaactagacagaatcattatcagaaacatctttgtgatgtgcgcactcaacaaaaagagttgaaaattttctttgatggagcgtttttaaacagtctttttgtagaatctgcaagtggacatttggaacgctttgaagtcttcgttggaaacgggaatatcttcacataaaaactgtacagaatcattctcagaaacctctttgtgatgtgtgtactcaactcacagagttgaatctttcttttgataaagcagttttgaaacactgtctttgtggaaactgcaaatgaatatttggacaggtttgaggctttcattggaaacgggaatatcttcacataaaaactagacagaagcattctcaaaaacttgtttgtgatgtgtgcactcaactcacagagttgaacctttcttttcacagagcagttttgaaacactctttttgtggaatctgcaagtggacatttggagtgctgtgtggccttcattggaaacgggaataacttcacaaaaaactagacagaagcattctcagaaacttctttgcgatgtttgcattcaactcacagagttgaaacttttattttcatttgaaacactgcttttgtggaatttgcaagtggatatttcgacaactttgaggctttcacttgaatcgggagtatcttctcataaaaactagacagaagatttcttggaaacatctttctgatgtttggattaaactcaaagagttgaacattcgttttcatagagtagttttgaaacattctttttatagtatctgcaagtcgacatttggagcactttgagtcctatggtgataaagaaaatatcttcaaataaaaattagacagaagcattctcagaaacttctctgtgatgtgtacattcaactcacagagttgaaaattctttttcatagagcagatttgaaacactccttttgtagaatctgcaagtggacatttggagcgctctgaggccttcgctcgaaatgggaatatcgtcacataaaaactagacagaagcattatcagaaacttctttctgatgtgtcctttcaactcacagatttgaactcttcttttgatagagcagttttgaaacactctctttgtagaatctgcaagtggacatttggtgtgtttttggtttatggtgaaaaaggaaatatcttcacataaaaactagacaggatcattctcagaaacttctttgtgatgtgtgtactcaactcacagagttgaacctttcttttgatagagcagttgtcaaacactctttaagtggaatctgcaagtggacacttggagtgctttgtgaccttctttggaaacgggagtatcttcacatgaaaactatacagaagcattgtcagaaacttctttgtgatgtgtgcatttaactcacagagttgaacctttcttttgatagagcagttttgaaacactctctttgtagaatctgcaagttgatatttggacagctttgaggcattcattggaaacgggaatatcttcacataaaatctagacagaaggattctcagaaacttctttgtgatgttttcattcaattcacaaagttgaacattccttttcatagagcagttttgaaaaactcttttcatattatttgcaagtggacatttggagcgctttgaggcctacggtgaaaaaggaaatatcttcacataaaaactagacagaagcattatcagaaacttctttgtgatgtgtgtactcaactcacagagttaaacatttcttttgatacatcagtttgaaacactcttcttgtagaatatacaagtggatattaggaccgcgtgtgaagctttcgatggaaacgggaatatcttcacataaaaaccagactgaaggcattctcagaaacttccttgtgatgtgctcattcaactcacagagttgaaactttctattgataaagcagctttgaaacactctttttgtagaatttgcaagtggatatttcgaaagctttgaagccttcgctggacacgggagtatcttcccataaaaactagacagaagcattctcagaaacttatttgtgatgtttgcattcaactcagagagctgaacattccttttcattgagcacttttgaaacactctttttgtagtatctgcaagtggacatttggacagctttgcggcctatagagaaaatggaaatatcttcacataaaaactagacagaagcattctcagaaacatctttgtgatgtttgcattcaactcaaagagttgaacattccttttcatacagcagttttgaaaaactcttattgtagaatctgcaagtggtcatcctgagtgctttgaggccttcattcgaaacgggaatatcttcacataaaaaataacagaagcattctcagaaacttctttgtgatgtgtgcatttaactcacagatttgaacccttcttttacagagcagttttgacacactctttttgtgtaatctgcaagtggacatttgttgttctttgaggcctatgatgaaaaaggaaatatcttcacataaaaactagacagaagcattctcagaaacatctttgtgatatctgaagtcaactcacagagttgaaactttcttttgagagatcagttttgaaacactctttttgtggtatctgcaagtggacacttggagcgcttagtggtcttcgttggaaacgggaatatcttccaataaaaactagacagaagcattctcagaaacttctttgtgatgtgtgcgttcaacaaccagagttgaacttttcttctgatagagcagattggaaacactcatttcgtagaatttgcaagtggatgtttggacagctttgaggccttcaatggaaacgggaatattttcacataaaaacaagacagaagcattctaagaaacttgttattgatgtgtgtcctcacctgagagaattgaacatttcttttgatagagcagttttgaaacactctttttgtaggatctgcaagtggatatttggacggctttgaggctttcgttggaaaccggaatattttcacataaaaactagagagaagcattctcggaaacttctttgtgatgtttgcattcaactcacagagttgaacattccttttcatagagaagttttgaaaccctctttttgtagaatctgcaagcagacatttggagcgatttgaggcctccagtgaaaaaggaaatatcttcatataaaaactagacagaagcattctcagaaattactttgtgatgtgtgcattcgactcacagagttgaaacttccttttgatagagcagatttgaaacactctttctgtagtattttgaagtggatatttggacagctttgaggccttcactggaaacaggtatatcttcacataaaaactagacagaagcactctcagaaactgctttgtgatgtttgcattccactcacagcgttgaatattccttttcatagagctgttttgaaacaatctttttgtagaatctgcaaatggacacttggaggactttgagggctatggtgaaaaaagaaatatcttctcataaaaactatacagaagaattctcagaaattctttgtgatgtgtgtactcaactcacagagttgaacctttcttttaatagagcagtttttaaatactgtttttgtagaaaatgcaagtggatatctggatagctttgaggctttcgttggaaacggaaatatcttcacataaaaactagacagaagcattctcagaaacttctttgtgatgtttaccttcatctcacagagttgaaaattccttttcatagagcagtttcgaaacactctttttgtagactctgcaagcgttcatttggagctctttgaggctttcgttcaaaaggagaatatcttcacataaaaactagacagaagcattatcagaaacatcttcgtgatgtgtgcattgaactcacagagttgaacccttcttttgatagagcagttttgaaacactctctttgtagaatctgcaagtggatatttggtgtgctttgaggcctatggtgaaaaaggaaatatcttaacataaaaactaggcagatgcattctcagaaacttatttgtgaagtgttaactcaactcacagagttgaacctttattttgatagagcagttttgaaacactctttttgtggaatctgcacgaggacatttggagcgctttgtggccttcgttggaaacgggaatatcctcacataaaaactacacagagtcattctcagaaactccttcgtgatgtttgaattcaactcacagagttgaacattccctttcatagagcagttttgaaacacagtttttctaatatctggaagtggacattttgagcgctttgaggtctatggggaaaaaggaaatatcttcacataaaaactagacagaagcattctcaaaaacttctttgtgatgtgtgccctcaactcacagggttagaccttttttttgatagagcagttttgaaatactctacttgtagaatttaaagtggatatttcgacagctttgaggctttcgttggaaacgggaatatcttcatataataaccagacagaagcattctcagaaacttctttctcatgtttgcaatcaaatcacagagttgaacattccttttcatagagtagttttgaaaaaccctttttgtacaatttgcaaatggacatttggagcgcttggaggcctacggtgaaaaaggaaatatcttcacataaaaattagacaaaagcattctcagaaatttctttgtgatgtgtgtactcaactcacagagatgaatctctcttttgctagagcagttttgattcactctttttgaagcatttacaagtggatatttggacagctttgtggcattcattgggaacgcgaatatgttcacataaaaactagacagaagcattctcagaaacttctttgtgatgtttgcattcagctcacagagttcagcatttcttttcatacagcagttttgaaacactctttttgtagtatctgctagtggacatttcgagcgctttgaggcctatgttgaaaaaggaaatatcttcacataaaaactagacagaagtattctcaggaactcctttgtgttgtgtgtactcaactcacagagttaaaccgtcttttgatagagcagttttgaaacattcttcttgtagaatttacaattaaatattctgacaggtttgaggatttcgttggaatggggagtatcttcacataaaaactggacagaagcattttcagaaactgctttctgacatgtgcattcaactcaccgagttgaaactttcttttgatagagcagattggaaacactctttttgtagaatttgcaagtggatatttgcacagctttgaggccttctttggaaacgggtgtatcttcacataaaaactagttagaagcgttctagtaaactgctttttgatttttgcgttcaactcacagagttgagcatttcttttcatagagcagttttgaaacattctttttgtagaatctgcacttggacatttggagtgctttgaggcctatggtggaaaagggaatatcttcacataaaaaccagacagaagcattctcagaaactactttgcgatgtgtgctgccaactcacagagttgaacattccttttcatagagcagtttcgaaacactctttttgtagaatctgcaagtggtcatttggagtgctttgatgccttccttcaaaacgggaatatcttcacataaaaactagatcgaagcattttcagaaacaactttgtgatgtgtgcattaaactcacagagttgaacccttcttttgatagagcagtttgaaacactctctttgtagtatgtgcaagtggacatttgttgtgcatgaggcctatcatgcaaaaggaagtatcttaacataaaaagttgacagaagcattctcagaaacttatttgtgatgtgtgcactccactcacagagttgaacctatcttttgatagagcagttttgaaagattatttttgtgcaatctgcacctggacattaggagcactttgtggccttcgttggaaacgagaatatcttcacataaaaactagaaagaagcattctcagaaacttcattgtgatatttgcattcaactcacagagttgaacattccttgtcatagagcagttttgaaacactctttttgcagaatctacagtggtcctttggagcactttgaggccttcgttcgaaacaggaatatcttcatttaaaaactagaaagaattattatcagcaacatctttgtgatttctgcattcaactcagagaattgaactcttcttttgatagagcagttttgaaacactctctttgtagaatctgcaagtggacttttggtgtgctttgaggcttgtggtgaaaacggaaatatgttaacatgaaaactagacagacgcattctccgaaacttatttgtgatgtgtgcactcagctcacatagttgaacctttcttttgagagagaaattttgaaaccctctttttgtggaatctgcaagcgcacatttggaacgctttgtggcctacgttggaaacgggaatatcttcacataaaaactagacagaagcattctcagaaacttctttgtgatgttgacattcaactcacagagttgaacattccctttcatagagcagttttgaaacactctttttgtagaatctggaagtggacgtttggagcgctttgaggccaatggtgaaaagaaatatcttcacataaaaactagacagaagtattctcagaaacttctttgtgatatgtgtactcaactcacagatttaaatctttcctttgatagagcagttttgaaacactcttcttgtagaatttgcaagtggatattaggatagctttgaggctttccttggaaatgggaatatcttcatataaaaaccagacagaaacattctcagaaacttctttgtgatgtttgcattcaactcacagagttgaacattccttttcatagagcagttttgaaacactctttctggaatctgcaagtggacatttggagcgcttggtggcctatggtgaaaaaggaaatatcttcacataaaaacgagacaaaagcattctcagaaacttctttgtgaagtgtgtactcaactcacagagttgaacctttcttttgctgcagcagttttgaatcactccttttgaagcatttccaagtggatacttggacagctttgaggctttcattggaaacgggagtatcttcacataaaaactagacagaagaattctcagaaacttctttgtaaagtgtgcattcaactcacggtgttgacactttcttttaatagagcagattggaaacactctttttgtagtatttgcaattggatatttggacagctttgacgctttctttggaaacgggactatcttcacataaaaactagacagaagcattctcagaaacttctttgtgatgtgtgcactcaactcacagacttgaacctttcttttgatagagcagttttgaaacactctttttgtagtatctggaaggggacatttggagcgctttgaggcctaaggtgaaaaaggaaatatcgtcacataaacattagacagaatcattatcagaaacatctttctgatgtgtgcatccaactcacagagttgaacccttcttttgatagagcagttttgaaacactctctttgtagatctgcaagtggacattgggtgtgctttgaggtctatggtgaaaaagaaatatcttaacaaaaaaactagacagaagcattctcagtaactttttgtgatgcttgcattcaactcacagaattgaacattcctcttcatagagcagttttgaaacactcttttgtagtatctggaagtggatatttggggggctttgaggcctatggcgaaaaaggaaataccttcacatgaaaactagacagaagcatcctcggaaacttctttgtgatgtgtgtagtgaagtcagagagatgaacctttctttttatagagcagttttgaaacactctctttgtagaatctgcaagtggacatttgttgtgctatgagacctacagtgaaaaaggaaatgtcttcatatgaaaactagacagaagcattctcagaaacttctttgagatgtgtgcagtcaactcacagagttaaacctttcttttgatagagcagattggaaacactctttttgtagtatttacaagtgggtatttggacaaatttgaggccttcacaggaaacgggaatatcttcacataaaaacaagacagaagcattctaagaaacttcttcgtgatgtgtgtcctcaactcacagagttgaac

SEQ ID NO: 909 - DNA, 10536 bp, Homo sapiens
  source 1..10536: mol_type = other DNA
ttcttttgatagggaaattttgaaacactctttgtacgatctgcaagttgatatttggagagatttgaggctctcattggaaacgggaatattttcacataaaaacaagtcagaagctgtctcagaaacttctttgtgatgtttgcattcaactcacagagttgaacattccttttcatagagcagttttgaaacactctttttgtagaatgtgcaagtggtcatttggagcgctttgaggccttcgttcaaaaagggaatatcttcacataaaagctagacagaatcattatcagaatcatctttgtgatgtgtgccttcaactcacagagttgagcccctcctttgatacagcagttttgaaacactgtctttgtagaatctgcaagtggacatttggtgtgctttgaggcctatggtgaaaaaggaaatatcttaaaataaaaactagtcagaagcattctcataagcttgtttgtgatgtgtgcactcaactcacagagttgaacctttcttttgacagagcagttttgaaactccctttttgtggaatctgaaagtggacatttggagagctttgaggagtatggtgggaaagaaatatcttcacacaaaaaaatagacagaagaattctcagaaacttctttgtgatgtttgcattcatttcaccgagttgaacattccttttcacagagcaggtttgaaacactctttttgtaacatctggaagtggacatttggagcgctttgaggcctatggtgaaaaatgaaatatcttctcataaaaaccagacggaaacattctcagaaacttctttgcaacgtgtgcattaaactcacagagttgaacttttcttttcatagagcagattggaaaaactctttttgtagaatttgcaagttgatatttggacagcttcgaggccttcactggaaacaggaatatcttcacataaaaacaagacagaagcattctaagaaacttctttgtgatgtgtgtcctctactcacagagtttaacgtttctttttcatagatcagttttgaaacactctctttgtaggatctacaagggaatacttggacagctttgaggctttcgttggaaacggaatattttcacataaaaactaggcagaagcattctcagaaacatctttgtgatgtttgcattcaactcacagagttgaccattccttttcatagaggagttttgaaacactctttttgtagaatctgcaagtggacatttggaatgatttgaggcctatggtgaaaaaagaaatgtctacacataaaaagtagccagaagcattctcagaaactactttgttatgtgtgtactcaactcacagagtaaaagctttcttttgatagagcagtgctgaaacacactttttgtagaatttacaagtggatattaggtcagctttgaggctttcgttggaaatgggaatatcttcacataaaaagcagagagaagcattctcagaaacttctttgtgatgtgcgcattcaactcacagagttgaaactttcctttgatagagcagatttgaaacactctttttatagaatttgcaagtggatatttggacagctttgaggccttcgctggaaatgggaatattttcacataaaaactagacagaagcattctcagaaactactttgtgatgtttgcattcaactcacagagttgaacattacttttcatagagcagttttgaaactctctttttgtagaatctgtaagtggacacttggagccctttgaggcctatggtgaaaaaggaaatatcgtcatataaaaactaaacagaagaattctcagaaaatttttgtgatgtttgcattcaactcacagaattgaacattgcttttcatagagcagatttgaaacactctttttgtagaatctggaagtggtcaattgtagcgctttgaggcctttgttcgaatcgggaatatcttcacataaaaactagacagaagcattgtcagaaacacctttgtgaagtgtgcattcaactcacagagttgaaaccttcttttgatagagaagctttgaaacactctctttgtagaatcggcaggtggacatttgttgtgctttgaggcctatgttgaaaaaggaaatatcttcacataaaaactagacagaagcattctcagaaacttctttgtgatgtctgcattcaactctcagagttgaacattttttttcatagagcagttttgaaacactctttttgtaatatctggaagtggacatttggagcactttgaggattatggtgaaaaaggaaatatcttcacataaaaactagacagaagcattctcagaaactggtttgtaatgtgtgtactgaactcacagagataaagctttcttttgatagagcagttttgaaacactcttcttgtaaaatttaaaagtggatattaggacacctttcaagctttccttaaaaacgggaatatcttcacataaaaactagacagaagcattctccgaaacttctttgtgatgtttgcattcaactcacagatttgatcatttcttttcatagaggagttttgaaacactttttgtagaatctccaagtggtcatttggagcattttgaggccttcttttgaaacaggaatatcttcacatagaaactagacagaatcattaccagacacatctttgtgatgtgtgcattgaactgacagaattaaacctttcttttgttagaggagttttgaaacactctctttatagtatctgcaagtggacattgggtgtgctttgaggcctatggtgaaaaaggaaatatcttaatataaaaactcgacagaattattgtcagaaacttatttgtgatgtgtgcagacaactcacagagtggaacctttcttttgatacagcagttttgaaacaccctttttgtttaatctgcacgtggacatttggagtgctttgtggccttcattggaaacgggaatatcttcacataaaaactagacagaagcattctcagaaatttcttggtgatgtttgcattcaacccacagaggtgaacattccctttcatagagcagttttgaaacactcttattgtagtatctggaattggatatatggagcgctttgagtcctatggtgaaaaaggtaatatcttcacataaaaagtagacagaagcattctcagaaacttctttgtgatgtgtgcattcaactcacacagtggaacctttcttttcatagagcagattggaaacactctttttgtagaattttcaagtggatatttggacagcttagaggccttcacaggaaacgggaataccttcacataaaaacaagacagaaacattctgggaaacatctttgtgatgcgtgtcctcaactcacagagttgaacatttctttttcatagagcagctttgaaaccctctctttataggatctgcaagggaatatttggacaactttgaggctttcgttggaaacgagaatattttcacataaaaactagtcaaaagcattctcaaaaacttatttgtgatgtgtgcacacaactcacagggttgaacattccttttcatagagcagttttgaaacactctttttgcagaatctgtaagttgtcatttggagcactttgaggccttcgttcgaaacgggaatatcttcacatagaaactagacagaagcattctcagaaacatctttataatgtgtgtactcaactcccggagttaaacccttcttttgatagagcagcttggaaacactcttcttgtagaatttacaagtggctcttaggacacctttaaggcttcccttggacatgggaatatcttcacataaaaaccagacagaagcatactcagaaacttctttgtgatgctttcattcaactcacagagatgaacattccttttcatagagcagttttgaaacagtctttttgtagaatctgcaagtggagatttggagcgcttggtggcctatggtgaaaaaggaaatatcttcacataaaaactagacaaaagcattctcagaaacttctttgtgatgtgtgcactcaactcacagagatgaatctttcctttgctagagcagttttgaatcactatttttgaagcatttacaagtggatatttggacagctttgaagctttggttggtaacgggaatatcttcacataaaaactagatagaagcattctcagaaacttctttgggatatgttcattcaagttacagtgttgaaactttctttaaatagagcagattggaaacactctttttgtagaatttgcaaatggatatttggacagctttgacgctttcatgggaaacgggagtatcttcacataaaaactggacagaagcattctcagaaacatctttgtgatgtgtgcattcaactcacagagttgaaacttacttttgatagagcggatttgaaacactctttttgtagaatttgcaagtggatatttggacagctttgacgctttcattggaaacgggtgtatcttcccataaaaactagacagaagaattccaagatacttctttgtgatgtgtgtactcaactcacagagttgaaactttcttttgatagagagttttgaaacactctttttgtagaatctgcaagtggatatttggataactttgagtttttcatgggaaacgcgaatatcttcacataaaaagtagacatgagaattctcagaaacttctttgtgatgtttgcattcgactcacagagttgaacattacttttcatagggcagttttgaaacactccttttgcagtatctgcaagcggacttttggagtgctttgaggcctatggtgaaaaatgaaatatcttcacatgaaaactagacagaaacattctcagaaacttctttgtgatgtgtgcattcaactcacagagttgaacattccctttcatagagcagttttgaaacaatatttttgtagtatctgcaaggggacttttggagcactttgaggccattgttgaaaaaggaaatatcttcacataaatactagacagaagcattctcagaaacttctttgtgatgtgtacattcaactcacagagttgaacattactttccatggagcagttttggaacactctttttgtagtatctggaagtggatattttgaacgctttgaggcctatgatgaagaaggaaatatcttcacataaaaattagaccgaagcattctcagaaactactttgtgatgagtgcattcaactcacagtgttgaacatttcttttgatagagcagattggaaaccctctttatgtagaatttgcaagtggatatttggacagctttgaggccttcactggaaaccggaagatctacaaataaaaacaagacagaagcatgctaagaaacttctttctgatatgtgtactcaactcacagagttgaacatttctttttttagagtagttttgaaacactctctttgtaggatctgcaagggaatatttggacacctttgaggctttcgttggaaacgggaatatcttcacataaaaactagtcagaggcattctcagaaacttcttcgtgatgtttgcattcaactcacacagttgaatattccctttcatagagcagttttgaaacactctttttgtagtacctggaaaaggacatttggagcgctttgaggcctatgctgaaaaaggaaatatcttcacataaaaactagacagaagcattctcagaaacttctctttgatgtgtgtactcaactcacagagttgaacctttctgttgatactgcagttttgaaacattctttttgtatactctgcaagtggatatttggataaatttgaggctttcgttggaaacgggaatgtcttcacataaaaactagacagaagcattctcagaaactttttttttgatgcttgtattcaactcacagagttgaacattccttttcatagggcagttttgaaacactctttttgaagtatctgtaagtggaaacatggagctctttgaggcatatgctgaaaaaggaaatatcttccaataaaaactagacagaagaactctcagaaacttctttgtgatgtgtgtactcaattcacagagttaaacttgtcttttgatagagcagttttgaaacactctttttgtagggtgtgcaagtggatatttggatagctttgagaatttcattggaaacgggaatatcttcacataaaaactagacagaagcattctcagagacttatttgtgatgcttgcattcatctcacagagttgaacattcctttccatagagcagttttgaaacactctttttgaggaatatgcaattggatatttggagtgatttgagacctatggtgaaaaataaaatatcttcacataaaaagtagacagaagcattctcagaaactactttgtgatgtgtgtactcaactcacagagttaaacctttcctttgatacagcagttttgaaacactcttcttgtagaatttacaagtggatattaagacagcattgaggatttctttggaaaagggaatatcttcacaaaaaactagacagaagcattctcagaaacttttttgtgatgtgtgcattcaactcacagagttgaaattttcttttgatagaggagattggaaacaatctttttgtagaatttggaagtggatatttggacagattggaggccttcgctggaaatgggtatatcttcacataaaaactacacagaagcattgtcagaaacttctttgtgatgcttgcattcaactcacagaattgaacattccttttcatagagcagttttgaaacactttttttgtagaatacataagtggaagcttggagggctttgaggtctatgataaaaaaggaaatatcttcccataaaaaatagacataagaattctccgaaacttctttgtgaggtgtgtactcaactcagagaggtgaactattcttttgattgagcagttttgaaacactctttttgtagaatctgcaagtggatatttggatagctttgaggatttcgtaggaaacgggaatggcttcacataaaaactagacagaagcattctcagaaacttctttgtgatgtttgcattcaactcacagatttgaaaattcgcttacatagagcagttttgaaacacactttttgtagtatctggaagtggacatttggagcgatttgaggcctatggtgaaaatggaaatatcttctaataaaaactagtcagaagaattatcagagacttctttgtgatgtgtgtactcaattcacagagttgaactttattttgatagaccaattttgaaacaatctttttgtagtatctgcaagtggatatttggatagctttgaggatttccatggaaacgggaatatcctcacataaaaactagacagaagcattctcagaaacttctttttgatgtttgcattcgactcacggagttgaaaattccctttcatagagcagttttgaaacactctttttgtaggatcttcaagtgttcatttggagcgccttgaggccttcgttcaaaatgggactatcttcacataaaaactagacagaagcattatcagaaaaacctttctgatgtgtgcattcaactcacagagttgaaccattcttttctagagcagttttgaaacactctgtagaatctgcaagtggacatttggtgtgctttgaggcctttggtgaaaaaggaaatatcttaacataaaaactagacagaagccttctcagaaacatatttgtgatgtgtgcactcaactcacagagttgaacctttcttttgatagagcagttttgaaacactctttttgtagtatctgtaagtggagatttagagcgctttgaggcctatggtgaaaaaggaaatatcttcacatgaaaactagacagaagcattctcagaaacttctttgtgatgcttgcattcaactcgcagagttgaaaattccttttcatagagcagttttgaaacactctttttgtagaatctgctaaaggtcatttggagcactctgaggccttcgttcgaaacgggaatacttcacataaaaattagacagaatcattatcagaaacacctttgttatgtgtgcaatcaactcacagagttgaaccctttttttgatagagcatttttgaaacactctttttataggatctgcaagtggacattttgtgtgctttgaggcccatggtgtaaaaggaaacatcttaacataaaaactaggcagaagcattctcagaaactcctttgtgatgtgtgcattcaactcacagtgttgaaactttcttttgatagagccgatttgaaacactctttttgtagaatttgcaagtggatatttggacagctttgagaccttcgctggaaacgggaatatcttcacataaaaactagacagaagcatactcagaaacatccttgtgatgtttgcattcaattcatggagttgaacattccttttcatagggtagttttgaaacacactttttgtagtatctgcaagtggacttttggtacgctttgaggcctatagtgaaaaaggaaatatcttcacataaaaactagacagaagaactctcagaaacttctcggtgatgtgtgtactcaactcacagtgttgtacctttcttttgatagaggagatttgaaacactcttcttgtggaatctgcaagtggacatttggagtgctttgtggccttcgttggaaacgggtatatcttcatataaaaacgagacagaagcattctcagaaacatcttagtgaagtttgcattcacctcacagagttggaaattccctttcatagagcagttttgaaacactctttttgtagtatctggaattggacatttggagcgctttcagaaccatggtgaaaaaggaaatatatccacataaaaactagacagaagtattctcagaaacttctttgtgatgtgtgtacttaaatcacagtgttgaattttcttttgatagagcagttttgaaacactctttttgtagaatctgcaagtggatatttggataggatttaggctttcgttggaaacgggaatatcttcacataataactagacagaagcattctcagaaacttctttgtgatgtttgcattcaacacacagatttgagcattccttttcacagagtagtttttaaacactctttttgtagaatctgcaagtggtcatttggagcactttgaggccttcgttcgaaaagggaataccttcacataaaaactagacagaatcattatcagaaatatctttgcaatatgtgcattgaactcacagagttgaatccgtctttttatagagcagttatgaaacactctctttgtaggatctgcaagtggacattttggtgtgttttgaggcctatggtgaaaaatgaagtatcttaacataaaaactagacagaagcgttgtcagaatcttatttgtgatgtgagcactcaactcacgtatttggacctgtcttttgatagagcagatttgaaacactttttttgtgtaatctgcaagtgcacatttagagcgctttgtggccttcattggaaacgggaatatcttcacataaaaactagacggaagcattctcagaaacttctttgtgatgtgtgtactcaactcactgagtttaacctttcttttgatagagaagttttgaaacaatctttttgtagtgtctgcaagtggatatttggatagctttgaggctttcgttggaaacgagaatatcttcacattaaaactagacagaagcattctcagaaacttgtttgtgatgtgtgtactcaactaacagagtttaacctttcttttgatagagcatttttgaaacactctttttgtaggatcagcaagtggacattttgtgtgctttgaggcctatggtgaaaaaggaaatatcttcccataaaaactagacagaagcattctcagaaacttccttgtgatgtgtgtactcaactcacagagatgattctttcttttgatagcgcagttttgaatcactctttttgaaacatttacaagtgcatatttggacaactttgagtctttcgttggaaacgggaatatcttctcataataactaaacaaaagcattctaagaaaattctttgtgatgtgtgcattcaactcacagagttgaacctttgttttgatacagcagatttgaaaaactcttcttgtagaatttgcaagtggatattgcacagctttgagaccatcgctggaaacgggaatatcttcacatagaaactagacagaagcatactcagaaagttgtttttgatgttagcattcaactcacggagttgaatattccttttcatagggcagttttgaaacacactttttgtagtatctgcaagtggacttttggagctctttgaggcctatcgtgaaaaaggaaatatcttcccataaaaattacacagaag

SEQ ID NO: 910 - DNA, 6131 bp, Homo sapiens
  source 1..6131: mol_type = other DNA
caagatggccaaataggaacagctctggtctgcagctcctagcaagacctatgcagaagacgagtgatttttgcatttccaactgagtggtgcctagaaccccagcaggacagaaccgttcactttcctggaaagggagctgaagccagggagccaagtggtctcactcagtgggtcccactcccatggaacccagcaagctaagaaacactggcttgaaattctcaatgccagcatagcagtctgatgttgacctgggatgatggagtttggtgtgagaggagcatccgtcattactgaggcttgtgtaggcagtttttcccggacagtgctaaggaggccaggaagttcagactgggcagaactcaccacagtgtggcaaagcggttgtggccagactgcctccctagatcactcctcactgggcaggatctctgaaagaaaggcagcagcttatagataaaattcccatctccctgggacagagcccctgggggaaggggtagctgtgggtgcagcttcagtggacttaaatgtccctccctgccggctctgaagagaacagtggatcctgacagggaggattctcccagcacagtgcccaagctctgctaagggacagactaccttctcaagtgggtccctgactcccgtgcctcctgactggaagagacctcccagcagggaccgacagacacctcttacaggagagctctggctggcatctggcaggtggccctctgggacaaagcttccagagaaaggagcaagcagcaatctttgctgttctgctgcctccaatgatgatgcccaggcaaacagggtctggaatggatctccagcaaactgcagcagacctgcagaagaggggcctgactgttagaagaaaaactaacagacagaaaacaataatatcaacatcaacacaaaggacccccacacaaaatccccatccaaaagtcatcaacttcaaatatcaaaggtagagaaatccatgaagatgagtaaaaaccagcacaaaaatgctgaaaattccaaaaatcacaatgctgcttcttctctaaatgatcagaactcttctccagcaagggcacaaaactggatggagaatgagtttgacaaattgacaaaagtcggcttcagaagataggtaataaattcctctgaggtaaaggagcatgttctaacccaatgcaaggaagccgagaaccttgataaaaggttacaggaactgctaactagaataaccagtttaaagaagaacataaatgacctgatggagctgaaaaacacagcatgagaactctgtgaagcatacacaagtatcaatagccaaatcaatcaagcagaagaaagaatatcagaaattgaggatcaacttactgaaataaggcataaagacaagattagagaaaaaaaatgaaaaagatgatcaaagcctccaagaaatatgggactatgtgaaaagaccaaatctatgactgattggtgtacctgaaagtgaggggaagaatggaaccaagttggaaaacatacttcatggtattatccaggagaacttccccaacctagcaagacaggccaacattcaaattcaggaaatacagaaaacaccactaagatactccatgagaagagcaacatgaagacacataatcatcagattctccaaggttgaaatgaaagaaaaaatgttaaaggcagccacagagaaaggtcaggtttcttagaaagggaagcccatcagactaacagtggatctctctgcagaaaccctacaagccagaagagagtagggaccaatatgcaacattcttaaagaaaagaattttcaacccagaatttcatatccagccaaactaagcttcataagtgaaggagaattaaaatcctttacagacaagcaaatgctgaaggatttcgtcaccaccaggcttgccctacaagagctcctgaaggaagcactaaatatggaaaggaaaaaccagtaccagctactgcaaatacgtaccaaattgtaaagaacatcaacactatgaagaaactacatcaagtaacagccacaataaccagctaccatcataatgacagaatcaaattcacacaatgacagaatcaaattcacataatgacagaatcaaataacaatattaatcttaaatgtaaacgggctaaatgccccaattaaaagacacagactggcaaattggatagagtcaagacccatcagtgtgctgtattcaggagactcatctcacatgcaaagacacacataggctcaaaataaaaagatggaggaatatttaccaagcaaatgcaaagagaaaaaaaaagcaagggttgcaatcctagtctctgataaaacagactttaaaccaacaaagatcaaaacagacaaagaaggccattacataatggtaaagggatcaatgcaacaagaagagctaactatcctaaatatatatgcaccaaatacaggagtacccagattcataaagcaagttcctaaagacatacaaagagacttagactcacacacagtaatagtggaagactttaacaccccattgtcagtattagatcaatgagacagaaaattaacaaggatatccaggacttgaactcagctctggaccaagcggacctaatagatatctacagaactctccaccccaaatcaggagaatatacattcttctcagcaacacatcgcacttattctaaaattgaccacataattggaagtaaaacactcctcagtaaatgcaaaagaacagaaatcataacaaacagtctttcagaccacagtgcaatcaaattaggactcaggattaggaaacccactcaaaactgcacaactacatggaaactgaacaacccgctcctgaatgactactgggaaaacaacaaaatgaaagcagaaataaagatgtgttttgaaaccaatgagaacaaagacacaatgtaccagaatctctgggacacagccaaagcagcattagagggaaatgtatagcactaaatgcccaaaggagaaagcaggaaagatctaaaatcgacaccctaacatcacaattaaaagaactagacaagcaagagcaaacaaattcaaaagctagaagacaagaaataatgaagatcagagcagagctgaaggagatagagacatgaaagtcccttcaaaaaaatcagtgaatccaggagctggttttttaaaaagatcaataaaatagatagaccgctcagactaataaaaaagaacagagaagaatcaaatagatgcaataaaaaatgataaagggaatatcacaactgatcctacagaaatacaaactaccatcagagaatactataaacacctctatgaaaataaactagaaaatctagaagaaatggataaattcctggacacatacaccctcccaagactaaatcaggaagaagtagaatccctgaatagaccaataacaagttctgaaattaaggcagtaattaatagcctaccaaccaaaaaaagcccaggaccagatggattcacagccaaattctaccagaggtacaaagaggagctggtaccattccttctgaaattattccaagcaatagaaaaagagagactcctccctaattcattttatgaggccggcatcattctgacaccaaaacctggcagagacacaacaaaaaaagaaaatttcaggccaatgtccctgatgaacatcaatgcaaaaatcctcaataaaatactgaccaaccgaatccagcagcacatcaaaaagcttatccaccacaatcaagtcggcttcatccctgggatacaaggctggttcgacatacacaaatcaataaatgtaatccatcacataaacagaaccaatgacaaaaaccacatgattatctcaatagatgcagaaaaggccttcgataaaattcaacaccgcttcatgctaaaaactctcaataaactaggtgttcatgtgagatacctcaaaataataagagctatttatgacaaacccatagccaatatcataccgaatggggaaaagctggaagcattccctttgaaaactggcaaagacaaggataccctctctcaccattcctattcaacatagtattggaagttctgtccagggcaatcaggcaagagaaagaaataaaaggtactcaaataggaagagaggaagtcaaattgtctctttttgcagatgacatgattgtatatttagaaaaccccattgtctcagcccaaaaactccttaagctgataatcaacttcagcaaagtctctggatacaaaatcaatgtgcaaaaatcacaagcatccctatacaccaataatagacaagcagagagccaaataatgagtgaacttcccattcacaatagctacaaagaaaataaaataccaaggaatacaacttacaagggatgtgaaggacctcttcaaaaagaactacaaaccagtgctcaagaaaaataagagaggacacaaacaaatggaaaaaaaattccatgcttatcaataggaagaatcaatatcatgaaaatggccatactgcccaaagtaatttatagattcaatgctattcccatcaagctaccattgacgttcttcacagaattagaaaaaactactttaaatttcatatggaaccaaaaaagagcctgtatagccaagactatcctaagcaaaaagaacaaagctggaggcatcacgttacctgacttcagactatactacaaggctacagtaaccaaaacagcatggtactggtgccaaaacagacatatagaccaatggaacagaacagaggcctcagaaataacaccacacatctgcaaccatatgatctttgacaaacctgataaaaacaagcaatggggaaaggattctctatgtaataaatgttgctgggaaaactggctagccatatgcagaaaactgaaactggaccccttccttacaccttatacaaaattaactcaagttggattaaagacttaagtataaaacctaaaaccataaaaaccatgaagaaaacctaggcaataccattcaggacatagacatgggcaaagacttcatgactaaaatatcaaaagcaattgcagcaaaagccaaaattgacaaatgtgatctgattaaactaaagagcttctgcacagcaaaagaaactgccatcagagtattcctacagaataggagaaaagttttgcaatctatcaatctgacaaaggtctaatatctggaatgtacagtgaacttaaacaaatttacaagaaaaaaccaacccccatcaaaaagtggccgaaggatatgaacagacacttctcaaaagaagatgtttatgcagccaacaaacatgaaaaaaagctcatcatcactggtcattagagaaatgcaaatcaaaaacacaatgagataccatctcatgccagttagaatggcaatcattaaaaagtcagaaaacaacagatgtagagagaggatgtggaaaaataggaatgcttttacactgttggtgggagtgtaaattagttcaaccattgtgggagacagtgtggcaattcttcaaggatctagaaccagaaataccatttgacccaacaatcccgttactgggtatatacccaaaggattataaatcattctactgtaaagacacatgcacacatatgtttactgcagcactatttacaatagcaaagacttggaaccaaccaaaatgcccatcagtgatagactggataaagaaaatgtggcacatataccccatgaaatactatgcagccataaaaaagaatgagttcatgtcctttggagggacatggatgaagctggaaagcatcattctcagcagactaacacaggaacagaaaaccaaacactgcatgttctcactcataagtgggagttgaacaatgataacacgtggacacagggaggggagcatcacacaccggggcctgttggggggtggggggacaaatatctaatgcatgcagggcttaaaacctagatgttgggatgataggtctggcaaagcaccatcacacatgtatacctgtgtaacaaacctgcatgttctgcacttgtatcccagaaattaatgtaaaaaaaaaaa

SEQ ID NO: 911 - DNA, 2197 bp, Homo sapiens
  source 1..2197: mol_type = other DNA
gactaaacctcctaaaaatgactgaattttgctaagaacagtgaccttttttcttgccctaattccatctccatctcttatactctacaaaagatgtgaaagccaagagctttataactatctgttttaaaaagcagtagcttagcagccagtgcaagatacagaacagatttggagctccctaaaagccccatctctagagaactggcattatttaacctgtttagcagcttctgaaaagcttcattctcagggcttgcctttatttaacctgattgaagtaaatcttattctatatgaacaactgtatccacatggcatttatcaaaaacaatcagttaattgtttaattgtttaacattgcagctgcctgaggtggcattgacagttgaagctaacaaaaggctgaccaaaaataaaagaaaaaaattggggaatgagatatctgtagggagctttacaaagctctaacatatttctggaaatctgaaaggccatgtaaatataaagagctgtacacatccccagaaaaaaaaaaaaaaactgagaaactcctaatctgtcacctctggctgacctttaggctcttcatgagcaagaaatggaggctaaggcaaagttgtaaacttcccgctagagcactgaagacatgacccaacacaaacacagaacctgctgtgttctgggggatctgttggtttaaggcatttaaggaaaatctctgttcaataattagttgactgttaagctaacagagcagagccatacacaacaaagaatatagactacagaattagtctaggaaagtcactaagcaaacatacagcaacaatgacaacaaaaacaaaaacaacaaacagcaataacaaaaaaactatggggagaagaagaatctgtaaaactgtattattcaaaacgtccagttttcagcaaaaattatgagacacacaaagaaataggaaactattgcccatacacaggataaaaagcagtcaatagaagttatccctgaggaagtcaagacattggacttactatacaaagactttaaggcaactattacaaatatgtttaaagaattaatgaaagccatttctaaataaagtatgagaatgatgactcaatgcatagagagtatcattaataatactacaaattataagtaagaaccatgtacgaattacagatttgaaaaatataatgaaataaaatattcatgagagggcccagcagcagattggaactagcagaagaaagaatcactaaacttgaaggcaggtcaatgagattatccaatctgaagaacataaagaaaaaaaagataaaagaaaaaatgaacagagactcagagacctgtgagacacaccatcaagtgtaccaacatatgcatagtggaagtcccaaaaggaagagagagagaaaggggaagaaagaacatttgaaaaattaatagccaaaaccttttcaaacctgatttttaaaaatataagtctatacattcaagaaagtcaaagaacttcaactaggaaaattcaaggagtcactactagaaaaattacatttaactgttacaagccaaagacaatgagcaaatctttttaattaataaaattttttctttgctaatcagctgacttcaggatgagaatcttgaaagcaagagaaaagtgactcattatatacaagagaacctcaataagattaacagctaactcctcatcagaaactgtaaaggccagaagatagtgagatgacatatataaaagtgttgaaagaaaactaagaattctatatgcaggaaatctacccttcaaaaacaaaagggaacttaggacactctcaaataaataaaactaaattcatcactagctactaaaggaagtccttcaggctaaaagcaaagtgtactagatagtaactcaaacttgtatgaagaaataaaaagtaccaataaagataactgtgtaggtaaatataaagaacagaataagtatatttttatttctcttatcttctgatttaaaagacaaccaactgcataaagcaataattataaaactgtgtcaatgggcttataacacaaaaaggtgccatattcatgatagaataatggaaggaagaaatgaagcatagtttttgtatgctatgaaattaagttaatatgaactagattatcttaagtcaagttattaattga

SEQ ID NO: 912 - DNA, 6024 bp, Homo sapiens
  source 1..6024: mol_type = other DNA
ggggaggagccaagatggccgaataggaacagctctggtctacagctcccagcgtgagcgaggcagaagacgggtgatttctgcatttccatctgaggtaccgggtgcatctcactagggagtgccagacagtgggggcaggccagtgggtgtgcgcaccatgcgcgagctgaagcagggcggggcattgcctcacctgggaagcacaaggggtcagggagttccctttccaagtcaaagaaaggggtgaaggacacacctggaaaatcgggtcactcccacccgaatattgctcttttcagaccggcttaaaaaacggcgcaccacgagactatatcccacacctggctcggagggtcctacgcccacggaatctcgctgattgctagcacagcagtctgagatcaaactgcaaggcgccagcgaggctgggggaggggcgcccgccattgcccaggcttgcttaggtaaacaaagcagccgggaagctcgaactgggtggagcccaccacagctcaaggaggcctgcctgcctctgtaggctccacctctgggggcagggcacagacaaacaaaaagacagcagtaacctctgcagacttaaatgtccctgtctgacagctttgaagagagcagtggttctcccagcacgcagctggagatctgagaactggcagactgcctcctcaagtgggtccctgacccctgacccccgagcagcctaactgggaggcaccccccagcaggggcacactgacacctcacacagtagggtattccaacagacctgcagctgagggtcctgtctgttagaaggaaaactaacaaacagaaaggacatccacaccgaaaacccatctgtacatcaccatcatcaaagaccaaaagtagataaaaccacaaagatggggaaaaaacagaacagaaaaactggaaactctaaaacgcagagcgtctctcctcctccagaggaacgcagttcctcaccagcaacagaacaaagctggatggagaatgactttgacgagctgagagaagaaggcttcagacgatcaaattactctgagctacgggaggacattcaaaccaaaggcaaagaagttggaaactttgaaaaaaatttagaagaatgtataactagaataaccaatacagagaagtgcttaaaggagctgatggagctgaaaaccaaggctcgagaactacgtgaagaatgcagaagcctcaggagccgatgcgatcaactggaagaaagggtatcagcaatggaagatgaaatgaatgaaatgaagcgagaagggaagtttagagaagaaagaataaaaagaaatgagcaaagcctccaagaaatatgggactatgtgaaaagaccaaatctacgtctgattggtgtacctgaaagtgatggggagaatggaaccaagttggaaaacactctgcaggatattatccaggagaacttccccaatctagcaaggcaggccaacgttcagattcaggaaatacagagaatgccacaaagatactcctcgagaagagcaactccaagacacataaatgtcagattcaccaaagttgaaatggaggaaaaaatgttaagggcagccagagagaaaggtcgggttaccctcaaagggaagcccatcagactaacagcggatctctcggcagaaaccctacaagccagaagagagtgggggccaatattcaacattcttaaagaaaagaattttcaacccagaatttcatatccagccaaactaagcttcataagtgaaggagaaataaaatactttacagacaagcaaatgctgaccgattttgtcaccatcaggcctgccctaaaagagctccttaaggaagcgctaaacatggaaaggaacaaccggtaccagccgctgcaaaatcatgccaaaatgtaaagaccatcaagactaggaagaaactgcatcaactaacgagcaaaatcaccagctaacatcataatgacaggatcaaattcacacataacaatattaactttaaatataaatgggctaaatgctccaattaaaagacacagactggcaaattggataaagagtcaagatccatcagtgtgctgtattcaggaaacccatctcacgtgcagagacacacataggctcaaaataaaaggatggaggaagatctaccaagcaaatggaaaacaaaaaaaggcaggggttgcaatcctagtctctgataaaacagactttaaaccaacaaagatcacaagagacaaagaaggccattacataatggtaaagggatcaattcaacaagaagagctaactatcctaaatatatatgcacctaatacgggaaaacccagattcataaagcaattcctgagtgacctacaaagagacttagactcccacacattaataatgggagactttaacaccccactgtcaacattagacagatcaacgagacagaaagtcaacaaggatacccaggaattgaactcagctctgcaccaagcggacctaatagacatctacagaactctccaccccaaatcaacagaatatacattttttttcagcaccacaccacacctattccaaaattgaccacatacttggaagtaaagctctcctcagcaaatgtaaaagaacagacattataacaaactatctctcagaccacagtgcaatcaaactagaactcaggattaagaatcccactcaaagccgctcaactacatggaaactgaacagcctgctcctgaatgactactgggtacataacgaaatgaaggcagaaataaagatgttgtttgaaaccaacgagaacaaagacacaacataccagaatctctgggacacattcaaagcagtgtgtagagggaaatttatagcactaaatgcccacaagagaaagcaggaaagatccaaaattgacactctaacatcacaattaaaagaaccagaaaagcaagagcaaacacattcaaaagctagcagaaggcaagaaataactaaaatcagagcagaactgaaggaaatagagacacaaaaaacccttcaaaaaatctatgaatccaggagctgcttttttgaaaggatcaacaaaattgatagaccgctagcaagactaataaagaaaaaaagagagaagaatcaaatagacacaataaaaaatgataaaggggatatcaccaccgatcccacagaaatacaaactaccatcagagaatactacaaacacctctacgcaaataaactagaaaatctagaagaaatggatacattcctcgacacatgcactctcccaagactaaaccaggaagaatttgaatctctgaatagaccaataacaggatctgaaattgtggcaataatcaatagtttaccaaccaaaaagagtccaggaccagatggattcacagccgaattctaccagaggtacaaggaggaactggtaccattccttctgaaactattccaatcaatagaaaaagagggaatcctccctaactcattttatgaggccagcatcattctgataccaaagccgggcagagacacaaccaaaaaagagaattttagaccaatatccttgatgaacattgatgcaaaaatcctcaataaaatactggcaaaccgaatccagcagcacatcaaaaagcttatccaccatgatcaagtgggcttcatccctgggatgcaaggctggttcaatatacgcaaatcaataaatgtaatccagcatataaacagagccaaagacaaaaaccacatgattatctcaatagatgcagaaaaagcctttgacaagattcaacaacccttcatgctaaaaactctcaataaattaggtattgatgggatgtatttcaaaataataagagctatttatgacaaacccacagccaatatcataccgaatgggcaaaaactggaagcattccctttgaaaactggcacaagacagggatgccctctctcaccactcctattcaacatagtgttggaagttctggccagggcaattaggcaggagaaggaaataaagggtattcaattaggaaaagaggaagtcaaattgtccctgtttgcagacgacatgattgtatatctagaaaaccccactgtctcagcccaaaatctccttaagctgataagcaacttcagcaaagtctcaggatacaaaatcaatgtacaaaaatcacaagcattcttatacaccaacaacagacaaacagagacccaaatcatgagtgaactcccattcacaattgcttcaaagagaatacaatacctaggaatccaacttacaagggatatgaaggacctcttcaaggagaactacaaaccactgctcaaggaaataaaagaggatacaaacaaatggaagaacattccatgctcatgggtaggaagaatcaatatcgtgaaaatggccatactgcccaaggtaatttacagattcaatgccatccccatcaagctaccaatgactttcttcacagaattggaaaaaactactttaaagttcgtatggaaccaaaaaagagcccgcatcgccaagtcaatcctaagccaaaagaacaaagctggaggaatcacgctacctgacttcaaactatactacaaggctacagtaaccaaaacagcatggtactggtaccaaaacagagatatagatcaatggaacagaacagagccctcagaaataacgccgcatacctacaactatctgatctttgacaaacctgagaaaaacaagcaatggggaaaggattccctatttaataaatggtgctgggaaaactggctagccatatgtaggaagctgaaactggatcccttccttacaccttatacaaaaatcaattcaagatggattaaagatttaaacgttagacctaaaaccgtaaaaaccctaggagaaaacctaggcattaccattcaggacataggcatgggcaaggacttcatgtccaaaacaccaaaagcaatggcaacaaaagccaaaattgacaaatgggatctaattaaactaaagagcttctgcacagcaaaagaaactaccatcagagtgaataggcaacctacaaaatgggagaaaattttcgcaacccactcatctgacaaaaggctaatatccagaatctacaatgaactcaaacaaatttacaagaaaagaacaaacaaccccatcaaaaagtgggcgaaggacatgaacagacacttctcaaaagaagacatttatgcagccaaaaaacacatgaaaaaatgctcatcatcactggccctcagagaaatgcaaatcaaaaccacaatgagataccatctcacaccagttagaatggcaatcattaaaaagtcaggaaacaacaggtgctggagaggatgtggagaaataggaacacttttacactgttggtgggactgtaaactagttcaaccattgtggaagtcagtgtggtgattcctcagggatctagaactagaaataccatttgacccagccatcccattactgggtatatacccaaatgactataaatcatgctgctataaagacacatgcacacgtatgtttattgcggcattattcacaatagcagaggcttggaaccaacccaaatgtccaacaatgatagactggattaagaaaatgtggcacatatacaccatggaatactatgcagccataaaaaatgatgagttcatgtcctttgtagggacatggatgaaattggaaatcatcattctcagtaaactatcgcaagatcaaaaaaccaaacaccgcatattctcactcataggtgggaatggaacaatgagatcacatggacacaggaaggggaatatcacactctggggactgtggtggggtggggggagggatagcattgggagatatacctaatgctagatgacgagttagtgggtgcagcgcaccagcacagcacatgtatacatatgtaactaacctgtacaatgtgcacatgtaccctaaaacttaaagtataataaaaaaaaaaca

SEQ ID NO: 913 - DNA, 6125 bp, Homo sapiens
  source 1..6125: mol_type = other DNA
gttccaagatggccaaataggaacagctacagtctacagctcccagcatgagtgacgcagaagacgggtgatttctgcatttccaactgaggtactgggttcatctcactggggcttattggacagcggatgcagcccacggagtgtgagctgaagcagggtggggcatcacctcacccggaaagcgcaaggggtcgcagaattccctttcctagccaagggaagccgtgacaagggaaacctggaaaatcaggacactcccactctaatactgcacttttccaacagtcttagcaaatggcacaccaggagattatatcccgtgcctggctcagagggtcccaaacccacagagcctcgctcactgctaacacggcagtctgagattgaactgcaaggcagcagcgaggctggggaaggggcatctgccattgctgaggcttgagtaggtacacaaagcggccaggaagggccaactgggtggagcccaccacagctcaaggaggcctgcctgcctctgtagactccacctgtgggggcagggcatagctgaacaaaaggcagcagaaacttctgcagacttaaacgtccctgtctgacagctttgaagagagtagtggttctcccagcatggagtttgagatctgagaacagacagactgcctcctcaagtgggtccctgacccccaagtagcctaactgggagacacctcccagtaggggccaactgacacttaatacagctgggtgcccctctgagacaaagcttccagaggaatgatcaggcagcaacatctgccattctgcaatatttgctgttctgcagcctccgctgctgatacccaggcaaacagagtctggagtggacctccagcaaactccaacagacctgcagttgagggtcctgactgttagaaagaaaactaatgaacagaaaggacatccacaccaaaaccccatctgtacgttaccatcatcaaagaccaaaggtagataaaaccacaaagatagggagaaaccagagcagaaaagctgaaaattctaaaaatcagagcacctcttctattccagaggaacgtagctcctcatcagtaacggaacaaagctggatggagaatgactttgacgagttgagagaagaaggcttcagacgatcggtaataactaatagctaaaggtggatgtttgaacccatcacaaagaagctaaaaaccttgaaaaaagattagatgaatggctaactagaataaacagtatagagaagaccttaaatgacttgatggagctgaaaaccatggcaagagaactatgtgatgcatgcacaagcttcagtagctgattcgatgaaatggaagaaaggtaatcagtgattgaagatcaaattaatgaaatgaagtgagaagagacgtttagagaaaaaaagagtgaaaagaaatgaacaaagcctccaagaaatatgggactatgtcaaaagaccaaatctacatctgattggtgtacctgaaagtgacggggaggatggaaccaagttggaaaacagtcttcaggatattatccaggagaacttccccaacctaccaaggcaagccaacatagaaattcaggaaattcagagaacgccacaaagatactcctcgagaagagcaatcccaagacacataattgtcagattcaccaaagtggaaatggaggaaaaatgttaagggcagccagaaaggtcaggttacccataaagggaagcccatcaaactaatagctgatctcttggcagaaactctacaagccagaagagagtgggggccaatattcaacattcttaaagaaaagaattttcaacccagaatttcatatccagccaaactaagcttcataagtgaaggagaaataaaatcctttatagacaaacaaatgctgagaggttttgtcactaccaggcctgtcttacagagctcccgaaggaagcactaaacatgaaaaggaacaaccggtaccagccactgcaaaaacatgccaaattgtaaagaccatcaatgctaggaagaaactgcatcaactaatgaacaaaataaccagctaacgtcatgacaggatcaaattcacacataacaatattaaccttaaatgtaaatgggctaaatgctccaattaaaagacacagactggcaacttggataaagagtcaagacccatcagtgtgctgtattcaggaaacccatctcacatgcaaagacacacataggctcaaaataaagggatggaggaagacctaccaagcaaatggaaaacaagaaaaaggcaggggttgcaatcctagtcttcgataaaacagactttaaaccaacaaagatcaaaagagacaaagaaggccattacataatggtaaagggatcaagtcaacaagaactaactatcctaaatatatatgcacccaatacagaagcatccagattcataaagcaagtccttagagacctacaaagagacttagactcacatacaataatgatgggagactttaacaccccactgtcaacattagacagatcaacgagacagaaagttaacaaggatatccaggaattgaactcatctctgcaccaagcagacctaatagatatctgcagaactctccaccccaaatcgacagaatatacattcttctcagcaccacattgcacttattccaaaattgaccacatagttggaagtaaaccattcctcagcaaatgtaaaagaacagaaattataacaaactgtccctcagaccacagtgcagtcaaactagaactcagaatttaaaaactcactcaaaaccgctcaactacatggaaactgaacaacctgctcctgaatgactattgggtacataacgaaatgaaggcagagataaagatgttctctgaaaccaatgggaacaaagacacaatataccagaatctctggcacacatttaaagcagtgtgtagagggaaatttatagcactaaatgcccacaagagaaagcaggaaagatctaaaattgacaccctaacatcacaattaaaataactagagaagcaagagcaaacacattcaaaagctagcagaaggcaagaaataactaagatcagagcggaactgaaagagatagagatacgaaagacccttcaaaaaaatcagtgaatccaggagctggttttttaaaaagatcaataaaatagatagatagatagaccgctcagactaataaaaaagaacagagaagaatcaaatagatgcaataaaaaatgataaagggaatatcacaactgatcctacagaaatacaaactaccatcagagaatactataaacacctctatgaaaataaactagaaaatctagaagaaatggataaattcctcaacacatatgccctcccaagactaaaccaggaagaagttgaatccctgaatagaggaataacagactctgaaattgaggcaataattaatagcctaccaaccaaaaaaagtccaggaccagatggattcacagccgaattctaccagaggtacaaagaggagctggtacaattccttctgaaactattcgaatcaacagaaaaagagggaatcctccctaattcattttatgaggccaacatcatcctgataccaaagcctggcagagacgcaacaaaaaagcaaattttagaccaatatccctgatgaacatcgacgcaaaaatcctcaataaaatactggcaaaccgaatccagcagcacatcaaaaagcttatccaccatgatcaagttggcttcatccctgggatgcaaggctggttcagcatacacaaatcaataaacatagtccatcatataaacagaaccaaagacaaaaaccacatgattatctcaatagacacagaaaaggcctttgacaaaattcagcagcccttcatgctaaaaattcttaataaactaggtattgatgggacatatctcaaaataatagctatctatgacaaacccacagccaatatcatactgaatggacaaaaactggaagcattccctttgaaaactggcacaagacagggatgccctctctcaccactcctattcagcatagtgttggaagttctggccagggcagtcaggtaagacaaagaaataaagggtattaagttaggaaaagagaaagtcaaattgtgcctgtttgcagatgacatgattgtatatttagaaaaccccatcatctcagcccaaaatatccttaagctgataagcaacttcagcaaagtctcaggatacaaaatcaatgtgcaaaaatcacaagcattcctatacaccaataccagacaaacagagagccaaatcatgagtgaacttcccattcacaattgcttcaaagagaataaaatacctaggaatccaacttacaagggatgtgaaggacctcttcaaggagaactacaaaccactgctcaatgaaataaaagaggacacaaagaaatggaaggacattccatgctcatggataggaagaatcaatatcatgaaaatggccatactgcccaaggtaatttatagattcaatgccatccccatcaagctaccaatgactttcttcacagaattggaaaaaactactttaaagttcatgtggaatcaaaaaagagccctcagtgccaacgcaatcctaagccaaaagaacaaagctggaagcattacgctaccggactgcaaactatactacaaggctacagtaaccaaaacagcatggtactggtaccaaaacagagatatagaccaatggaacagaacagagccctcagaaataataccacacatctacaaccatctgatctttgacaaacctgacaaaaacaagaaatggggaaaggtttccctatttaataaatagtgctgggaaaactggttagccatatgtggaaagctgtaactggatcccttccttacaccttatacaaaaattaattcaagatggattaaaaacttaaatgttagacctaaaaccataaaaaccctagaagaaaacctaggcaataccattcaggacataggcatgggcaaggacttcatgtcgaaaacaccaaaagcaatgacaacaaaagccaaaattgacaaatgggatctaattaaactaaagagcttctgcacagcaaaagaaactaccatcagagtgaacaggcaacctacagaatgggagaaaatttttacaatcttcccatctgacaaagggctaatatccagaatctacaaagaacttaaaacaaattaacaagaaaaaaatcaaacagccccatcaaaaagtgggcaaaggatatgaacggacacttctcaaaagaagacatttatgcagtcaacagacacatgaataatgctcatcagcactggccatcagagaaatgcaaatcaaaaccacaatgagataccatctcacaccagttagaatgacgatcattaaaaagtcaggaaacaaaaggtgctggagaggatgtggagaaataggaacacttttacactgctggtggttctgtaaactagttcagccattgtggaagacagtgtggtgattccttaaggatctagaactagaaataccatttgatccagccatcccattactgggtatatacccaaaggattataaagcatgctgctataaagacacctgcatatgtatgtttatttcagcactattcacaatagcaaagccttggaaccaacccaaatgtccatcaatgatagactggattaagaaaatgtggcacatatacaccatggaatactatgcagccataaaaaaggatgagttcttgtcctttgtagggacatggatgaagctggaaaccatcattctcagcaaactatcacaaggacagaaaaccaaacactgcatgttctcactcataggtgggaattgaacaatgagaacacttggacacagggtggggaacatcacacaccggggcctgtggtggggtggggagagagaggaaggatagcattaggagttatacctattgtaaatgacgagttaatgggtgcagcacaccaacatggcacatgtatacatatgtaacaaatgtgtacgttgtgcacatgtaccctagaacttaaagtataataataataaaaaa

SEQ ID NO: 914 - DNA, 655 bp, Homo sapiens
  source 1..655: mol_type = other DNA
ctctaaataccatctctacctgcccacccccattcaagctgtacacatttacttccctaactgtgttctcttccctgaactcatctcatatcctattatttacttacaaccatttggatttctaatagacatagaaaacttaacatgtccccccagaagtctattaattttcttcctgcacacactgccctcactccaggtctgctctgtctcaactcttcctcatctcaataaatgatatctcaattcattttagcaattgctcatgccaaaagctttggagtcatcttggtgtctccctttccctcagactccacattctatacataagaagtctcgtgggcttctgatgacatctcctcacctctgctgcatagcctaagccatcactcctcttgccagggctactgcagcagcccccaaagtctccttgtcccattgcagtatactttacacgcagtagctggagtgatcatttcaaaatcagataatattaccttaaagctgtatgatggcttcttactgcttttggaacaaatttcaaactctttaccacaccttctaaggattttcatgattatcacaatacttctttgacctcaccacttgatcaacttgacttcttcttcctcttattttccttcctcttcttaat

SEQ ID NO: 915 - DNA, 308 bp, Homo sapiens
  source 1..308: mol_type = other DNA
ggccgggcgcactggctcacgcctgtaatcccagcactttgggaggccgaggcgggtggatcgcaaggtcaggagatcaagaccatcctggttaacacggtgacaccccgtctctactaaaaatacaaaaaagtagctgggcatggtggcaggcatctgtagtcccagcttcgggaggctgaggcaggagaattgcatgaacccaggaggcggaggttgcagtgagctaagatcgcgccactgcattccagcctgggcgacagagtgagactccatctcaaaaaaaaaaaaaaaaaaaaaaaaaaaaa

SEQ ID NO: 916 - DNA, 132 bp, Homo sapiens
  source 1..132: mol_type = other DNA
tatctatttgtctatatgtctgtctaccttggtaggttgggctccttgaagaagggttatgttttcttcatctccatatccccagtagctggccaatgcccagtatacaccaggggctcagtcgctgtttgt

SEQ ID NO: 917 - DNA, 6138 bp, Homo sapiens
  source 1..6138: mol_type = other DNA
ttccaagatggccaaataggaacagctccagtctacagctcctagtatgagcgatgcagaagatgggtgatttctgcatttccaactgaggtactgggttcatctcactgcggctttttggacagtgggtgcaggacagtgagtgcagcccacggagtgtgagctgaagcagggtgaggcgttgcctcaccaaggaagcacaaggggtcagggaattccctttcctagccaagggaagctgtgacagacggcacctggaaaaattgggacactcccaccctaatactttgcttttctaacggtcttagaaaatggcacaccaggagattatatcccgcacatggcttggagggtcccacgcccacagagcctcgcttactgctagcacaacagtatgagatcaaactgcaaggcagcaatgaggcttggggaggggcacctgccattgctgaggcttgagtaggtaaacaaagcggccgggaagctctaactgggtgcagcccactgaagctcaaggaggcctgcctgcctctgtagactccacctctgggggcagggcatagctgaacaaaaagcagcagaaacttctgcagacttaaaagtccctgtctgacagctttgaagagagtagtggttctcccagcatggagtttgagatctgagaatggacagactgcctcctcaagtgggtccctgacccccgagtagtctaactgggaggaacctcccagtaggggttgaccaacacctcatacagtcgggtgcccctctgagatgaagcttctagaggaacgatcagacagcaacatttgctgttctgcagtatttgctgttctgcagcctctgctggtgatacccaggcaaacagggtctggagtgagcctccagcaaactccaacagacctgcagctgagggtcctgactgttagaaggaaaactaacaaacagaaaggacatacacacaaaaaccccatctgtatgtcaccatcatcaaagaccaaaggtagataaaaccacaaagatggggagaaaccaaagcagaaaagctgaaaattcaaaaaattagagcacctcctctcctccaaaggaacgcagttccttgccagcaatggagcaaagctggatggagaatgactttgacaagttgagagaagaaggcttcagatgatcagtaataacaaacttctctgagctaaaggaggatgttcgaacccatcgcaaataagttaaaacccttgaaaaaagattagacgaatggctaactagaataaacagtgtagagaagtccttaaatgacctgatggagctgagaaccatggcaggagaactatgtgatgcatgcacaagcttcagtagccaattccatcaactggaagaaagggtatcagtgaatgaagatcagatgaatgaaatgaagcgagaagagaagtttagagaaaaaagagtaaaaagaaatgaacaaagcctccaagaaatatgggactatgtgaaaagaccaaatctatgtctcattggtgtacctgaaagtgacggggagaatggaacaaagttggaaaacgctctgcaggatattatccaggagaacttccccaatctagcaaggcaggccaacattcaaattcaggaaatacagagaactccacaaagatacttcttgagaagagcaactccaagatacataattgtcagattcaccaaagtttaaatgaaggaaaaaatgttaagggcagccagagagaaaggttgggttacccacaaagggaagcccatcagactaacagcagatctcttggcagaaactctacaagccagaagagagtgggggccgatattcaacattcttgaagaaaagaattttcaacccagaatttcatatccagccaaactaagcttcataagtgaaggagaaataaaatcctttacagacaagcaaatgctgagagattttgtcaccaccaggcgtgccttacaagggctcctgaaggaagcactaaacatgaaaaggaacaaccggtaccagccactgcaaaaacatgccaaattgtaaagaccatcaatgctaggaagaaactgcatcaactaacgagcaaaataaccagctaacatcataacgacaggatcaaattcacacataagaatattaaccttaaatgtaaatgggctaaatgctccaattaaaagacacagactggcaaattggataaagagtcaagacccatcagtgtgctatattcaggagacccatctcacgtgtggagacacacatagtctcaaaataaagggatggaggaagatctaccaaatggaaaaaaaaaaaaaaaaaagcaggggttgcaatcctagtctctgataaaacagactttaaaacaacaaagatctaaagagacagagaaggccattacataatggtaaagggatcaattcaacaagaagagctaactaacctaaacatatatgcacccaatacaggagcacccagattcataaagcgagtccttggagacctacaaagagacttagactcccacacaataataatgggagactttaacaccccactgtcaacattagacagatcaatgagacagaaagttaacaaggatatccaggaattgaactcagctctgcaccaagcggacctaatagacatctacagaattctccaccccaagtcaagagaatatacattcttctcagcaccacatcacacttattccaaaattgaccacatagttggaagtaaagcactcctcagaaaatgtaaaagaacagaaattataacaaactgtctctcagaccacagtgcaatcaaactagaactcaggattaagaaactcactcaaaaccgctcaactacatggaaactgaacaacctgctcctgaatgactactgggtacataacgaaatgaaggcagaaataaagatgttctttgaaaccaatgagaacaaagacacaacataccagaatctctgggacacatttaaagcagtgtgtagagggaaatttatagcactaaatgcccacaagaggaagcaggaaagatctaaaattgacaccaaaacatcacaattaaaagaactagagaagcaaaagcaaacacattccaaagctagcagaaggcaagaaataactaagatcagagcagaactgaaggagatagagacacaaaaaacccttcaaaaaatcaatgaatccaggagctggttttttgaaaagatcaacaaaattgatagactgctagcaagactaataaaaaagaaaagagagaagaatcaaatagatgcaatataaaatgataaaggggaaatcaccaccaatcccacagaaacacaaactaccatcagagaatactataaacacctctacacaaataaactagaaaatctagaagaaatggataaattcctggacacatacaccctcccgagacaaaaccaggaagaagttgaatccctgaataggccaatagcaggctctgaaattgaggcaataattaatagcctaccaaccaaaaaaattccaggaccagatggattcacagccgaattctaccagaggtacaaggaagagctggtaccattccttctgaaactattccaatcaatagaaaaagagggaatcctccctaactcattttatgaggccagcatcatcctgataccaaagcctggcagagacacaacaaaaaaaaagagaattttagaccaatatccctaatgaactttgatgcaaaaatcctaaataaaatactggcaaaccaaatccagcaccacatcaaaaagcttatccaccatgatcaagtgggcttcacccctgggatgcaaggctggttcaacatacacaaatcaatgaatgtaatccagcatataaacagaaccaaagacaaaaaccacatgattatctcaatagatgcagaaaaggcctttgacaaaattcaacagcgcttcatgctaaaaactctcaattaggtattgatgggacatatctcaaaataataagagctatctatggcaaacccacagccaatatcatactgaatgggcaaaaactggaagcattccctttgaaaacgggcacaagacagggatgccctctctcaccactcctattcaacataatgttggaagttctggccagggcaatcaggcaggagaaagaaataaagggtattcaattaggaaaagaggaagtcaaattgtccctgtttacagatgacatgattgtataattagaaaaccccatcatctcagcccaaaatctccttaagctgataagcaacttcagcaaagtctcaggatacaaaatcaattgtgcaaaaatcacaagcattcctatacaccaacaacagactaagagagccaaatcatgagtgaactcccattcacaattgctacaaagacaataaaatacctaggaatccaatttacaagggatgtgaaggacctcttcaaggagaactacaaaccactgctcaatgaaataaaagaggacacaaacaaatggaagaacattccatgctcatggataggaagaatcaatatcatgaaaatgggccatacttcccaaggtaatttatagattcaatgccatccccatcaagctaccaatgactttcttcacagaattggaaaaaactactttaaagttcatatggaaccaaaaaagagcccacattgccaagacaatcctaagccaaaagaacaaagctggaggcatcacgctacctgacttcaaactatactacaaggctatagtaaccaaaagagcatggtagtggtaccaaaacagagatatagaccaatggaacagaacagagccctcagaaataataccacacatttacaaccatctgatctttgacaaacctgacaaaaacaagaaatggggaaaggattccctatttaataaatggtgctgggaaaactggctagccatatgtagaaagctgaaactggatcccttccttatgccttatacaaaaattaattaaagatggattaaagacttaaatgttagacctaaaaccataaaaatcctagaagaaaacctaggcaataccattcaggacataggcatgggcaaggacttcatgtctaaaacaccaaaagcaatggcaacaaaagccaaaattgacaaatgggatctaattaaactaaagagcttctgcacagcagaagaaactaccatcagagtgaacacgcaagctacagaatgggagaaaatttttgcaatctactcatctgacaaagggctaatatccagaatctacaaagaacttaaacaaatttacaagaaaaaaatcaaacaaccccatcaacaagtgggcaaaggatatgaacagacagctcccaaagaagacatttatgcaggcaacagacacatgaaaaaatgctcaccatcactggccatcagagaaatgcaaatcaaaaccacaatgagataccatctcacaccagttagaatggtgatcattaaaaagtcaggaaacaacaggtgctggagaggatgtggagaaataggaacacttttacactgttggtgggactgtaaactagttcaaccattgtggaagacagtgtggcgattcctcaaggatctagaactagaaataccgtttgacccagccatcccattactgggtatatacccaaaggattataaatcatgctgctataaagacacatgcacacgtatgtttattgcagcactattcacaatagcaaagacctggaaccaacccaaatgtccatcgatgacagactgtattaagaaaatgtggcacatacacagcatggaatactatgcagccataaaaaggatgagttcatgtctttgtagggacatggatgaagctggaaaccatcattctgagcaaactatctcaaggacagaaaaccaaacactgtatgttctcactcataggtgggaattgaacgagaacacttggacgcaggatggggaacatcatacactggggcctgtggtgtggtgaggcggggggagggatagcattaggagctatacctaatgtaaatgatgagttattgggtgcagcacaccaacatggcacatgtatacatatgttacaaacctgcacatgtaccctagaacttaaagtataaaaaaaaaaaaaaga

SEQ ID NO: 918 - DNA, 6032 bp, Homo sapiens
  source 1..6032: mol_type = other DNA
gagccaagatggccgaataggaacagctccggtctacagctcccagcgtgagcgacgcataagacgggtgacttctgcatttccatctgaggtaccgggttcatctcactagggagtgccagacagtgggcgcaggccagtgtgtgtgcgcaccgtgctcgagccgaagcagggcgaggcattgcctcacctgggaagcgcaaggggtcagggagttccctttccgagtcaaagaaaggggtgatggacgcacctggaaaatcgggtcactcccacccgaatattgcgcttttcagaccggcttaagaaacggcgcaccacgagactatatcccacacctggctcagagggtcctacgcccacggaatcgcgctgattgctagcacagcagtctgagatcaaactgcaaggcggcaacgaggctgggggaggggcgcccgccattgcccaggcttgcttaggtaaacaaagcagccgggaagctggaactgggtggagcccaccacagctcaaggaggcctgcctgcctctgtaggctccacctctgggggcagggcacagacaaccaaaaagacagcagtaacctctgcagacttaagtgtccctgtctgacagctttgaagagagcagtggttctcccagcacgcagctggagatctgagaacgggcagactgcctcaagtgggtccctgacccctgacccccgagcagcctaactgggaggcaccccccagcaggggcacactgacacctcacacggcagggtattccaacagacctgcagctgagggtcctgtctgttagaaggaaaactaacaaccagaaaggacatctacaccgaaaacccatctgtacatcaccatcatcaaagaccaaaagtagataaaaccacaaagatggggaaaaaacagaacagaaaaactggaaactctaaaatgcagagcgcctctcctcctccaaaggaacgcagttcctcaccagcaacagaacaaagctggatggagaatgattttgacgagctgagagaagaaggcttcagacgatcaaattactctgagctacgggaggacattcaaaccaaaggcaaagaagttgaaaactttgaaaaaaatttagaagaatgtataactagaataaccaatacagagaagtgcttaaaggagctgatggagctgaaaaccaaggctggagaactacgtgaagaatgcagaagcctcaggagccgatgcgatcaactggaagaaagggtatcagcaatggaagatgaaatgaatgaaatgaagcgagaagggaagtttagagaaaaaagaataaaaagaaatgagcaaagcctccaagaaatatgggactatgtgaaaagaccaaatctacgtctgattggtgtacctgaaagtgatgtggagaatggaaccaagttggaaaacactctgcaggatattatccaggagaacttccccaatctagcaaggcaggccaacgttcagattcaggaaatacagagaacgccacaaagatactcctcgagaagagcaactccaagacacataattgtcagattcaccaaagttgaaatgaaggaaaaaatgttaagggcagccagagagaaaggtcgggttaccctcaaaggaaagcccatcagactaacagcggatctctcggcagaaaccctacaagccagaagagagtgggggccaatattcaacattcttaaagaaaagaattttcaacccagaatttcatatccagccaaactaagcttcataagtgaaggagaaataaaatactttatagacaagcaaatgctgagagattttgtcaccaccaggcctgccctacaagagctcctgaaggaagcgctaaacatggaaaggaacaaccggtaccagccgctgcaaaatcatgccaaaatgtaaagaccatcgagactaggaagaaactgcatcaactaatgagcaaaatcaccagctaacatcataatgacaggatcaaattcacacataacaatattaactttaaatataaatggactaaattctgcaattaaaagacacagactggcaagttggataaagagtcaagacccatcagtgtgctgtattcaggaaacccatctcacgtgcagagacacacataggctcaaaataaaaggatggaggaagatctaccaagccaatggaaaacaaaaaaaggcaggggttgcaatcctagtctctgataaaacagactttaaaccaacaaagatcaaaagagacaaagaaggccattacataatggtaaagggatcaattcaacaagaggagctaactatcctaaatatttatgcacccaatacaggagcacccagattcataaagcaagtcctcagtgacctacaaagagacttagactcccacacattaataatgggagactttaacaccccactgtcaacattagacagatcaacgagacagaaagtcaacaaggatacccaggaattgaactcagctctgcaccaagcagacctaatagacatctacagaactctccaccccaaatcaacagaatatacatttttttcagcaccacaccacacctattccaaaattgaccacatagttggaagtaaagctctcctcagcaaatgtaaaagaacagaaattataacaaactatctctcagaccacagtgcaatcaaactagaactcaggattaagaatctcactcaaagccgctcaactacatggaaactgaacaacctgctcctgaatgactactgggtacataacgaaatgaaggcagaaataaagatgttctttgaaaccaacgagaacaaagacaccacataccagaatctctgggatgcattcaaagcagtgtgtagagggaaatttatagcactaaatgcctacaagagaaagcaggaaagatccaaaattgacaccctaacatcacaattaaaagaactagaaaagcaagagcaaacacattcaaaagctagcagaaggcaagaaataactaaaatcagagcagaactgaaggaaatagagacacaaaaaacccttcaaaaaatcaatgaatccaggagctggttttttgaaaggatcaacaaaattgatagaccgctagcaagactaataaagaaaaaaagagagaagaatcaaatagacacaataaaaaatgataaaggggatatcaccaccgatcccacagaaatacaaactaccatcagagaatactacaaacacctctacgcaaataaactagaaaatctagaagaaatggatacattcctcgacacatacactctcccaagactaaaccaggaagaagttgaatctctgaatagaccaataacaggctctgaaattgtggcaataatcaatagtttaccaaccaaaaagagtccaggaccagatggattcacagccgaattctaccagaggtacaaggaggaactggtaccattccttctgaaactattccaatcaatagaaaaagagggaatcctccctaactcattttatgaggccagcatcattctgataccaaagccgggcagagacacaaccaaaaaagagaattttagaccaatatccttgatgaacattgatgcaaaaatcctcaataaaatactggcaaaccgaatccagcagcacatcaaaaagcttatccaccatgatcaagtgggcttcatccctgggatgcaaggctggttcaatatacgcaaatcaataaatgtaatccagcatataagcagagccaaagacaaaaaccacatgattatctcaatagatgcagaaaaagcctttgacaaaattcaacaacccttcatgctaaaaactctcaataaattaggtattgatgggacgtatttcaaaataataagagctatctatgacaaacccacagccaatatcatactgaatgggcaaaaactggaagcattccctttgaaaactggcacaagacagggatgccctctctcaccgctcctattcaacatagtgttggaagttctggccagggcaatcaggcaggagaaggaaataaagggtattcaattaggaaaagaggaagtcaaattgtccctgtttgcagacgacatgattgtttatctagaaaaccccatcgtctcagcccaaaatctccttaagctgataagcaacttcagcaaagtctcaggatacaaaatcaatgtacaaaaatcacaagcattcttatacaccaacaacagacaaacagagagccaaatcatgggtgaactcccattcacaattgcttcaaagagaataaaatacctaggaatccaacttacaagggatgtgaaggacctcttcaaggagaactacaaaccactgctcaaggaaataaaagaggacacaaacaaatggaagaacattccatgctcatgggtaggaagaatcaatatcgtgaaaatggccatactgcccaaggtaatttacagattcaatgccatccccatcaagctaccaatgactttcttcacagaattggaaaaaactactttaaagttcatgtggaaccaaaaaagagcccgcattgccaagtcaatcctaagacaaaagaacaaagctggaggcatcacactacctgacttcaaactatactacaaggctacagtaaccaaaacagcatggtactggtaccaaaacagagatatagatcaatggaacagaacagagccctcagaaataatgccgcatatctacaactatctgatatttgacaaacctgagaaaaacaagcaatggggaaaggattccctatttaataaatggtgctgggaaaactggctagccatatgtagaaagctgaaactggatcccttccttacaccttatacaaaaatcaattcaagatggattaaagatttaaacgttaaacctaaaaccataaaaaccctagaagaaaacctaggcattaccattcaggacataggcgtgggcaaggacttcatgtccaaaacaccaaaagcaatggcaacaaaagacaaaattgacaaatgggatctaattaaactaaagagcttctgcacagcaaaagaaactaccatcagagtgaacaggcaacctacaacatgggagaaaattttcgcaacctactcatctgacaaagggctaatatccagaatctacaatgaactcaaacaaatttacaagaaaaaaacaaacaaccccatcaaaaagtgggcgaaggacatgaacagacacttctcaaaagaagacatttatgcagccaaaaaacacatgaagaaatgctcatcatcactggccatcagagaaatgcaaatcaaaaccactatgagatatcatctcacaccagttagaatggcaatcattaaaaagtcaggaaacaacaggtgctggagaggatgcggagaaataggaacacttttacactgttggtgggactgtaaactagttcaaccattgtggaagtcagtgtggcgattcctcagggatctagaactagaaataccatttgacccagccatcccattactgggtatatacccaaatgagtataaatcatgctgctataaagacacatgcacacgtatgtttattgcggcactattcacaatagcaaagacttggaaccaacccaaatgtccaacaatgatagactggattaagaaaatgtggcacatatacaccatggaatactatgcagccataaaaaatgatgagttcatatcctttgtagggacatggatgaaattggaaaccatcattctcagtaaactatcgcaagaacaaaaaaccaaacaccgcatattctcactcataggtgggaattgaacaatgagatcacatggacacaggaaggggaatatcacactctggggacggtgggtcgggggaggggggagggatagcattgggagatatacctaatgctagatgacacattagtgggtgcagcgcaccagcatggcacatgtatacatatgtaactaacctgcacaatgtgcacatgtaccctaaaacttagagtataataaaaaaaaataaaataaaaaaaataaa

SEQ ID NO: 919 - DNA, 4203 bp, Homo sapiens
  source 1..4203: mol_type = other DNA
gcccggccgcacgcaaaagagctcctgaaggaagcgctaaacatggaaaggaacaacgggtaccagccgctgcaaaatcatgccaaaatgtaaagaccatcgagactaggaagaaactgcatcaactaacgagcaaaatcaccagctaacatcataatgacaggatcaaattcacacataacaatattaactttaaatgtaaatggactaaatgctccaattaaaagacacagactggcaaattggataaagaatcaagacccatcagtgtgctgtattcaggaaacccatctcacgtgcagagacacacataggctcaaaataaagggatggaggaagatctaccaagccaatggaaaacaaaaaaaggcaggggttgcaattctattctctgataaaacagactttaaaccgacaaagatcaaaagagacaaagaacgccattacataatggtaaagggatcaattcaacaagaagagctaactatcctaaatatatatgcatccaatacaggagcacccagattcataaagtaagtccttagagacctacaaagagacttagactcccacacaatgataataggagactttaacacccccactgtcaacattagacagatcaatgagacagaaagttaacaaggatatccaggaactgaactcagctctgcaccaagcggacctaatagacatctacagagctctccaccccaaatcaacagaatatacatttttttcagcaccacaccacagctattccaaaattgaccacatagttggaagtaaagctctcctcagcaaatgtaaaagaacagaaattataagaaactatctctcagaccacagtgcaatcaaactagaactcaggattaagaatctcactcaaagccgctcaactacatggaaactgaacaacctgctcctgaatgactactgggtacataatgaaatgaaggcagaaataaagatgttctatgaaaccaatgagaacaaacacacaacataccagaatctctgggacgcattcaaagcagtgtgtagagggaaatttatagcactaaatgcccacaagagaaagcaggaaagatccaaaattgacaccctaacatcacaattaaaagaactagaaaagcaagagcaaacacattcaaaagctagcagaaggcaagaaataactaaaatcagagcagaactgaaggaaatagagacacaaaaaacccttcaaaaaattaatgaatccaggaggtggttttttgaaaggatcaacaaaattgatagaccactagcaagactaataaagaagaaaaaagagaagaatcaaatagacacaataaaaaatgataaaggggatatcaccaccaatcccacagaaatacaaactaccatcagagaatactacaaacacctctacgcaaataaactagaaaatctagaagaaatggataaattcctcgacacatacactctcccaagactaaaccaggaagaagttgaatctctgaatagaccaataacaggagctgaaattgtggcaataatcaatagtttaccaaccaaaaagagtccaggaccagatggattcacagccgaattctaccagaggtacaaggaggaactggtaccattccttctgaaactattccaatcaatagaaaaagagggaatcctccttaactcattttatgaggccagcatcattctgataccaaagctgggcagagacacaaccaaaaaagagaattttagaccaatatccttgatgaacattgatgcaaaaatcctcaataaaatactggcaaaacgaatccagcagcacatcaaaaagcttatccaccatgatcaagtgggcttcatccctgggatgcaaggctggttcaatatatgcaaatcagtaaatgtaatccagcatataaacagagccaaagacaaaaaccgcatgattatctcaatagatgcagaaaaagcctttgacaaaattcaacaacccttcatgctaaaaactctcaataaattaggtattgatgggacgtatttcaaaataataagagctatctatgacaaacccacagccaatatcatactgaatgggcaaaaactggaagcattccctttgaaaaccagcacaagacagggatgccctctctcaccactcctattcaacatagtgttggaagttctggccagggcaatcaggcaggagaaggaaataaagggtattcaattaggaaaagaggaagtcaaattgtccctgtttgcagacgacatgattctatatctagaaaaccccattgtctcagcccaaaatctccttaagctgataagcaacttcagcaaggtttcaggatacaaaatcaatgtacaaaaatcacaagcattcttatacaccaacaacagacaaacagagagccaaatcatgagtgaactcccattcacaattgcttcaaagagaataaaatacctaggaatccaacttacaagggatgtgaaggacctcttcaaggagaactacaaaccagtgctcaaggaaataaaagaggatacaaacaaatggaagaacattccatgctcatgggtaggaagaatgaatatcgtgaaaatggccatactgcccaaggtaatttacagattgaatgtcatccccataaagctaccaatgactttcttcacagaattggaaaaaactactttaaagttcatatggaaccaaaaaagagcccgcatcgccaagtcaatcctaagccaaaagaacaaagctggaggcatcacactacctgacttcaaactatactacaaggctacagtaaccaaaagagcatggtactggtaccaaaacagagatatagatcaatggaacagaacggagccctcagaaataacgccacatatctacaactatctgatctttgacaaacctgggaaaaacaagcaatggggaaaggattccctatttaataaatggtgctgggaaaactggctagccatatgtagaaagctgaaactggatcccttccttacaccttatacaaaaatcaattcaagatggatgaaagatttaaacgttagacctaaaaccataaaaaccctagaagaaaacctagtcattaccattcaggacataggcatgggcaaggacttcatgtccaaaacaccaaaagcaatggcaacaaaagccaaaattgacaaatgggatctaattaaactaaagagcttctgcacagcaaaagaaactaccatcagagtgaacaggcaacctacaaaatgggagaaaattttcgcaacctactcatctgacaaagggctaatatccagaatctacaatgaactcaaacaaatttacaagaaaaaaacaaacaaccgcatcaaaaagtgggcgaaggacatgaacagacacttctcaaaagaagacatttatgcagccaaaaaacacatgaaaaaatgctcatcatcactggccatcagagaaatgcaaatcaaaaccacaatgagataccatctcacaccagttagaatggcaatcattaaaaagtcaggaaacaacaggtgctggagaggatgtggagaaataggaacatttttacactgttggtgggactgtaaactagttcaaccattgtggaagtcagtgtggcgattcctcagggatctagaactagaaataccatttgacccagccatcccattactgggtatatacccaaaggactataaatcatgctgctataaagacacatgcacacgtatgtttattgcagcattattcacaatagcaaagacttggaaccaacccaaatgtccaacaatgatagactggattaagaaaatttggcacatatacaccatggaatattatgcagccataaaaaatgatgagttcgtgtcctttgtagggacatggatgaaattggaaatcatcattctcagtaaactatcgcaagaacaaaaaaccaaacaccgcatattctcactcataggtgggaattgaacaatgagatcacatggacacaggaaggggattatcacactctggggactgtggtggggtggggggaggggggagggatagcattgggagatatacctaatgctagatgacgagttagtgggggcagcgcaccagcatggcacatgtatacatatgtaactaacctgcacaatgtgcacatgtaccttaaaacttaaagtataataaaaaaaacaaaa

SEQ ID NO: 920 - DNA, 5167 bp, Homo sapiens
  source 1..5167: mol_type = other DNA
aggagattttttttttcataccctagtggtgcctggaaccccagtgagacagaaccgttcactcccctagaaaggtgactgaagccagggagccaagtggtcttgctcagtgggtcccactcccacagaacccagcaagctaagaaccaccagcttcaaattctcactgccagtacagcagtctgaagtcgacctgggataatcaagcttggtgtggggaggggtgtctgctattactaaggcttgaataggcggttttcccctcacagtactaaggactgggcagaaccgaacatagtgtggcaaagtagctgtggccagactgactctctagattcctcttcactgggcacggcatctctgaaagaaaggcagcaggcccagtcaaaggcttatagataaaactcccatctcactgggacagagcacctggggaaaggggctgttgtgggtgtatcttcagtggacttaaatgttcctgcctgccagctctgaagagatcagcagatcctgaaaaggagggttcaaccagcacagcactagagctctgctaaggaacagactgccttctcaagtgggtccctgactcctgtgcctcctgactgggagagacctcccaaaaggggttgacagacacctcatgcaggagagctctggctggcatcaggttggtgcccctctaggacaaagcttccagaggaaggagcaggtgggaatctttgctattctgcagcctccactggtgatatccaggcaaatagggtctggagtggacctccagcaaactacagcagacctgcagaagaagggccatcaacaaaaaagaacccccactcataaaccccatcaaaaggtcatcaacctcaaagatcaaaggtagataaatccatgaagatgaggaaaaaccagcacaaaaatgctgaaaattccaaaaacctgaaagccacctctccaaatgatcacagctgttctccagcaagggcacaaaattggacagagaatgagtttgatgaactgacagaggtaggcttctcaagatgggtaataacaaagtcctctgagctaaaggagcatgttctaacccgatgcaaggaaactaagatccttgacaaaaggctacaggaactgctaattagaataaccagtttagagtagaatataaatgacctgatggagctgaaaaacacagcatgaaaacttcatgaaggatacaaaagtatcaacagccaaatcgatcaagcagaagaaagaatatcagagactgaagatcaaattactgaaatgaggtgtaaagacaagattagagaaaaagagactgaaaaggaacaaataaagtctccaaaaaatatgggactaggtgaaaagaccaaatctatgattgattgggttccttgaaagtgatggggagaatggaaccaaattggaagacacacttcaggatatcatccagaagaacttccccgacatagcaagacaggacaaattcaaattcagggactacagagaacaccttaagatactttttgagaagtgctaccccaagacacataatggtcagattctccaaggttgaaacaaaggaaaaaatgttaagggcagccagagagaaatgtcagattacttacaaagggaagcccatcagactaacagtggatttctctgcagaaaacctacaagccagaagagagtggagagggcaatattcaacattcttaaagaaaagaattttcaacccagaatttaatatccagccaaactaagcttcataagtgaaggacaaataaaatcctttacagacaagcaaatgctgagggatttcatcaccaccaggcctgtcttgcaagagctactgaagaaagcactaaatatggaaaggaaaaaccagtaccagccactgcagaaacacaccaaaatataaagaccaatgacactatgaagaaaccacatcaacgaatgtgcaaaataaccgtctagaatcatgaagacaggatcaaattcacacataacaatattaaccttaaacgtaaatggactaaatgcccccaattaaaagacacagactggcaaattggataaaaagtcaagatcaattggtgtgctgtattcaggagacccatctcacatgccaagacacacataggctcaaaataaaaggatggtaaaaaatatttaccaagttaatggaaaacagaaaaaaaaaaaaagcaaaaaaaaaaagcaggggttgcaatcctagtctctgataaaacagactttaaaccaacaaagatcaaaaaagacaaagaagggcattacataattgtagaggaatcaatgcacacaaagagctaactatcctaaatatatatgcacccaatacaggagtaaccagttttataaaacaagttcttagagacctacaaagggacttagactcccacacaataataaagggaggcttaaataccccactgtcaatattagacagatcaaggagacagaaaattaacaaggatattcaggacttgaactcagctctggaccaagagcacctaacagatatctacagaactctccatcccaaatcaacagaatatatattcttctcagcaccacatagcacttattctaaaatcaaccacataattggaagcaaaacactcgtcagcaaatggaaaagaacagaaatcataacaaacaggctctcagatcacagtgcaataaaattagaactcagaattaagaaactcactcaaaccacacaactacatggaaactgaacaaccttgttctgaataactactgggtaaataacgaaattaagggagaaataacaaagttttttgaaaccaatgagaacaaagacaatgtatcagaatttctgggatacagccaaagcagtggttagacagaaatgtatagcactaaatgcccacatcagaaagcgggaaagatctaaaatcaacaagctaacatcacaattaaaagaactagagaagcaagagcaaacaaattcaaaagccaacagaagacaagaaattgctaagatcagagcagaactgaaagagatcgagacatgaaaaactcttcaaaaaagtcaatgaattcaggacctggttttttgacaagattaacacaatagatagaccgctagccagactaataaagaataaaagagagaagaatcaaatagacacaataaaaatgataaaggggatatcaccactgatcctacagaaatacgaactaccatcagagaataatataaatacctctatgcaaatacctttatgcaaataaatctagaagaaaaggatacattcctggacacatacaccctcccaagactaaaccagaaagaaattaaatgcctgaatagaccaataacatgttctgaaactgaggcagtaattaatagcctaccaaccccaaaaaagcccaggaccagatggattcacagttgaattctaccagatgtacaaagaggagctggtaccattccttctgaaactattccaaacaatagaaaaagagggactcctccataactcatcatcctgataccaaaacctggcagagacaaacaaaaaaaggaaatttcagacccaaattactcatgaacatcgatgcaaaaatcctcaatgaaatactggcaagccaaatccagcagcacatcaaaaagcttatccaccatgatcaagtcagcttcatccctgggatgcaaggctggttcaacatacacaaatcaataaatgtaatccgtcacagaaataagtccaatggcaaaattcacaggattatgtcaatagatacagaaaatgcctttgataatattcaataacccttcatgctaaaaattctcgataaactaggtattgatggaacatatctcaaaataataagagctctttatgacaaacccacagccaatatactgaatgggcaaaacatggaagtattccctttgcaaactggcacaagacaaggatgccctctctcactactcccattcaacatagtattggaagttctggccagagcaacagaaagaaataaagggcattcaaataggaaaacaggaagtcaaattgtctctgtttgcagatgacaagattgtatatttagaaaaccccattgtctcagcccaaaatctccttaagctgatcagcaacttcagcaaagtctcaggttagaaaatcaatgtggaaaaatcacaagaagtcctatacaccaataatggacaaacagagagccaaatcatgagtgaactcccattaacaattgctacaaagagaataaaatacctagaatacaacttacaagggatgtgaaggaaatcttcaaggagaactacaaaccactactcaagaaaataagagaggacacaaataaatggaaaaacattccattcctaaagataggaagaatcaatatcatgaaaatggccatacacccaaggtaatttgtagattcaatgctattcccatcaagctaacattggctttctttacagaactagaaaaactacttttaatttcttacggaaccaaaaaatagcccgtatagtcaagacaatcctaagcaaaaagaacaaacctggaggcatcatgctacctgacttcaaactgtactacaaagctatggtaaccaaaacagcatggtattaatacaaaaacagaaatatagaccaatggatcagaacagaagcccaagaaataatgccacacatctacaaccttctgatctttggcaaacctgacaaaaacaagaaatggggaaaggattccccatttaacaaatgatgctgagaaaactggctagccatatgcagaaaacagaaattggaatactttttaacactttatacaaaaattaactcaagatggattaaagacttacatgtaaaacctaaaatgataaaaacccttgaagaaaacctaggcagtaacattcagaacatatgcatgggcaaagagtttatgactaaaacaccaaatacaattacaacaaaacccaaaattgacaaatgggatctaattaatgtaaagatcttctgctcaggaaaagaaaatatcatcagagtgagcaagcaacctacagaatgggagaaaatttttgccatctatccatctgacaaatgtctaatatccagaatctacaaggaatttaaacaaatttacaagtaaaa

SEQ ID NO: 921 - DNA, 2013 bp, Homo sapiens
  source 1..2013: mol_type = other DNA
agataacttcagcaacataggcttacaatttcttgagctcattcacctccaataaatatcacctctactctatgttagcaaccaaataacggcatcttacatcttctcctcttatagtattttacctccagaaactttgattccaatattccactctctgatcaaaacatcttaatattcctcctctcaaatttccttactcccactaaattggttctttaacatcactgaaaattcctaatccttgacacttctctattttcaaagtccctcttctctcagtccctgctggcttcatgttgatcaatgtgaatctggggcataattaccactagtttattgtgccctcacctattatttcctcatctgcttatctttccaccacccatgctttgcaattttcctataccagatgaacataaagatccatttatttacttttaattctgggttgcagagtgctactgcagaaaatcgcataagcacactgataaccgtcatttccaaggttaagattttcaacttcacgtgtactctcaaaattgctaaccaaacttttgcttttttccaattcgttccttttcttcatctgtcactaatatttgccacagcaattacttccactcttctcaaagttcctaaatatacacttctcagtagatcatcatgcttcctttacagagaaattaaaagccatcttgaagtgctttgaactaaccttcctgtacttatttcttttctcttgacttagagaagcagatgtccttaccttttccaagacaaatcattccactagtgattttctttcatagagtcactactccatcaattatccctcctcaccgagttatatgtctttaacacctctttttccactagcttttcctcatttgcctataaacgtgatcaaatcctctgcatcttaaaaaaatcacctaccctcaagagttcctctcccacaagctataacctataaccatatttccttaattttctccacagctaaacttcttgaaagagcactttgccctcagtggctctatttctttgtctctgacttgttattcattcactgcaatataatgtctgcttttacctttactgaaaccattctctctagaggcactaatgaataattaaacctgatcaattgacctctcttcctcaagtgggataaatgacttgacctttggcaatatttaacactctttatcactctcatctggaaactctcattcttggtttccacaatattaatctctcttagttcttcgacctctctgactagttttttttcttcatctgtccattacatgttggtgttaccaatattttctgctttgattgtcttctcatataaatctagatattttccacctcctcatcatcttcttcaatgattcaaccactgtatcaccatatgttcttggatgatgcctaattccatcttatctccagggctttcctctgcctggatgttccacagaaactgcaaacttagcatgtccaaaactgtatccccaaactggtgttcattcagcattccatctcagagaagagtatcagtattcccctgtttgctcaaagcagaaacctgaaaacccttctcctctgcttccacttcctcattcttttttctgtactcctcaaaattttggcaccaaattgtatcagttctatttgaaagctttatgaatttgccttcgttttgtccattgcccaagtttggctcttgtcttatttcaccctgacttctccaaaagcctaacagattatctccctgactttgatatctcctgtctataatcaatccaaatttaactttttgaaatcacaactgattatgtcaagcactcgctccaaaaggttaggtcgtttttccattgtccatagtataagtttcaaaatccttagcatagcatacaaggtttttctggtacaccctaagctaattttacaacctcatcatccaccactttttttcactctatgttctaatcacattgaactttt

SEQ ID NO: 922 - DNA, 6880 bp, Homo sapiens
  source 1..6880: mol_type = other DNA
tttcttggttccctgaccaggaagtgaggtgattaacagacggtcgaggcagccccttaggcagtttaggcctaccccatggagcatctctgtgggggactccggccagcttgagcaacgcagatcctgagagtgctcctgggtaggcaattgtcccagtggaacgcctcaccagagcagtgcgtggcaggcccctgtggaggatcaacgcagtggctgaacgccgggaaggaactggcacttggagtccagacatctgaaacttggtaagactagtctttggaaattgcctactccatttgagtggaagcgtggcctgatcacccatggcatgcctgtactggcagtttggttttttgtttttgacttgacttggattgcttgatactttggttttggttttgacctggcttggatttcttgatactctgattttggttttgattctggtttggtgtaaactgtaaaagtgtgtgtgtgccctttttacccgttctttttgtggtgtgcgtgcggtgtgagcgtggtgttttgtcttgaggaagcatgggtcaggcacaaagtaagcccaccccactaggaactatgttgaaaaatttcaagaaaggatttaagggagattacggtgttactatgacaccaggaaaacttaggactttgtgtgaaatagactggccagcattagaggtgggttggccatcagaaggaagcatggactggtcccttgtttcaaaggtatggcacaaggtaacctgtaagccagggtgcccagaccagttcccgtacatagacacttggttacagctggttttagaccccctccctacccccacggtggttgagagaacagcagcataagcagctggcagaggcaaggaaagaccagcaaagagacagagaagaaagagacaggaaaagaggcaaagagagagaagaagagagagaggaagagacagagagacaaagagggagtcaaggagaaagagagagagaggaagagacagaggcaaaaggaaagtcaaaaagagagacaatgtcaaagacagagaaatatacaagtagttaaaaaaaagtgtgccctattcctttaaaagccagggtaaatttaaaacctataattgataattgaaggtattctctgtaaccctataacactccaataccactttgttgtcagtgtaaacaagggcatatcccgaaagcacagaggccactgataacccgtagccttcctatcaaaaatctttaacccagtaacccacgaatggcccagatgcattcagtctgtagcggcaatggctttgctaacagaagaaagtaaaaaaataacttttagaggaaacctcagtgtgagcatacctcaccagttcagaagtatcctaaggaaaaaaaaaaaaaaaaaaaaggatgttttaacattaaccacgaaaaaaatcccttaacccagaagttttcctaacagggcatctaagtcttaattaccatacaaaggtccgaccagaccagaattccctacaggacaggaccatcaatggttcctcccgggtaattgaaggaaaaaaaaaaaaaaagccatctataccaattctaagttaatttggacaaaacaaggtcttattaatagcaaaggataattaaaatcccaaacttgcaaggttttcaacaaaagtaaagtttgctaaaagctaacattgtaacatgtattatagtaaattataatcttgtggccttagacagtctagtccacagtcataaagcaagttcgctttggaaaagaatggttatctctgaaaaaaaaaaaaagaagaaaaggaggggcagaatttatgtaaaaaaagtgttatatggtaaattcttgtcctgaaataaattaactggttgtttaaagaaagaaatgtttgtaataagtcagaaagttcaggcattgctaagaattgtctgcaaaagttgtgaaagagaaatatgttataaaaaaaaagaatttatgcaagaaaagttgtataatttaaaagtaactaggcctcctgaatgtaaaactattgaaataaacagtttatgtgcaaggtgtataaggaaagtaaaatataactttggtaaaaggattataaggaggcaaaagaatgtaagttgttacatacattaaaaggttaaaaaaactattttgaaggtttaagcaagttttaaaatgttaattgtaaaggaaattctgtgtgtaaacatattagccaaaggtaaaggggtaacatccagtttttctgtgaattggacattaaagtaaaaacacaatgggtttttcttaaagcactaacctgctctttaacaaagattataaaaagtgagtctataaaaatcttacctgatggtccaacatgaaaaattcaataaatatgtatacaaagttttattaaaactaagtttaacattaataacacactaatataaaggtgaaatttagcttatctggtataaaaatcatacaggaagcattgtcaaatataaaatggtatttggcttctttggtctaaaaactaataaaaataggtgctaaaggaaatttctcagtggaaaggcaccaagaactataaagtccactgctgatgtccccacatttaaaacaaaaggtcaacttcttagaaattatatacttggtttatcttccactttcctttccctcaaaactaaaagtcttttagcacatgtaccacccctagaatttccggtaaaccagcaccagcctatccgctcggggatgaacaagggctgactgattgataagctcttgaaaattcttaagctcactgcatcccttcaggtctccaaggaacgctaagtttcttccctgttgtgagagacacgaagtgaacttagtgttgggagacggaagctggatggccctcgggggctgacccgcagggtaccggactttgggatatagcagagagagcttggcatgacttactactccaggctgtagaatcctggataagagctaccatgcagcccacgtgtggtcgactggaggatcagctgcttagtggaaagaggacaatctgggcctctggcctgccatgtgcacaagcataacaattgcttttgtttaacgtgcagatggaatatttgatccattccaaccaggcatttgcatcttggtatcctgtcttaattgccaaagtttgttttaagtctttaacttctatcatcctctagtaaaatgaatgtatgattttaggaaattacaaaaaccggttggggcagcccatccttgctctttagtggtccacagaatgttggaccaactacggcataaaagctctacataggggagcaagactcctggttgacactggagtcttaatcaaaatttccccagattaaatggtcctaatttactaatgcccagtctgaggagagtcaggagggacagaggtacttttctgaagtagagagctgtctttgactgggcaagtccccacagggtataacaaggcaagcattaaatgcaatagtttgaggcaaaattgacttggttatgttaataaccagatggtcagcaaaagagcgaggtaagaagaaagagtaatagaatagattaagacttaaatttttgttagctttagtttggtaaggttttcccctgggactatggcccatgactctggagggggtggcactttcttgacttggttgtgattagtccatccttttttcactgtatgaacagcagtctcggtgtttagcagcacaaggtagggtccttcctaggctggatcgagtttcctttcttttcaccctttgatgagaacgtgatcttcaggatgtgtggtggtattgtgattgtgtgtggacctttactgggcactctgccgaataactggagtggcacttgtactttagttcaattggctatccctttcaccctggcatttcatcaaccagagggaagaaaaataagacattgtaaagcgagagaaggcccttatgggttttttgactctcacgtctatttagacacaattggagtcccacggggaataccagatcaatttaaagcttgaaatcaaatagctgcaggatttgagtcaatattttggtgggtggcagttaataaaaatgtaaattggataaactacatctattacaaccaacagcaatgagcttttcatgagttaaaagaaaaactcctgttggccccagccctgaggctacccgacctgacaaaagcctttacactctatgtgtcagaaaaagaaaacacggcagttggagttttaacccagactgtggggccctggccaaggccagtggcctatctctcaaaacaactagacggggtttccaaaggctggcccccatggctaagggccctggcagcaatggccctgttagcacaagaagcagataaactaacccttgggcaaaacctgaatataaagacccccccatgctgtggtaactttgatgaataccaaaggacatcattggctaacaaatgctagattaaccaagtaccaaagcttgctatgtgaaaatccccacataaccattgaagtttgcgacaccctaaaccctgccaccttgctcccggtatcagagagcccagttgaatatcactgtgttgtattgcactcagtttattctagtgggcccaacctctgagaccatccttgaacatcagtagactgtgagttgtacatgggcgagagcagcttcgccaacccctgcaaagtgactctgaagaagatgacaatacctgcttcagtcacacccggaagctgactggtccacgcatggccaaagcatgagaaaactcattgcgggactcattttccttaaaatttggacttataccatagggacttcaactgaccttcctcagactgaagactattcccagtatatacgtcaagtcactgaggtaggaaaaaagttgctacagtcctattattttatggttattataagtataccaggactctaaaaagaacttgtttgtataatgctattctatacaaggtatgtagcccaggaaatgaccaacctgatgtgtgttatgacccatctgagcctcccatgaccacagtttttaagattaaggactgaaacctggtgggggctcataaacgatatgagtaaagtgttagccaaaacaaaagaaaaaggggtgcccaaacaagtcaccttgaagtttgatgcctgtgttgtcattaatagtaataagttaggaataggatgtggttctcttaattaggaaaaaggctatatggcaaaaaaaaaaaaaaagtacatttgtcataaattaggactgtatggaaatgaacgtgcatactggtcttgtgtcatttcggctacttggataaaaaatgaaaaggatcccgtccaccttcagaaagggaaaagtggcccttcctgtacaagtggtcagtgtaaccccttagaactagtaataaccaacccccttgatcctcactggaaaaaaggggagcgtgtaaccctaggaattgagggggctggactggatcctcgagtaaatatcatggcttgaggagaagtttataaacgctctcctgagccagtatctcaacccttctacgattaactgaatgtgtcagtaccagaaattccaggaaaaacaagaaatttgtttttacaattagctgagcatgtagcctagtctctcagtttcacttcatgttatgtatgtggaggaactataatgggagatcaatggccatgggaagcctgagaattagtacctacagacccagttcctgatgaatccccagttcaaaagaatcaccctgataacttctgggtcctaaaagcctcaattattagacaatactgtatagcaagagtggggaaggacttcaaccttcctgtgggaagactcaactgccttgagcaaaaactgtataatattactacaaaaacagccacctagtggagttcaaaccacactaagaaaaatccatttagtaaattcccaaagttgcaaaccatgtgaacccacccagagtcccactgggactgggcagcccccactggattatactggatatgtgggcatagagcttacaccaaattaccctaccagtgggcagatagttgtgttattggcactattaaaccatctttcttcctactgcccataaagacaggcaaactcctgggcttccctgtctatgcttcccacaaaaagagaagcatagctataggaaattggaaagataatgaatggccccctgagagaatcatataatattatgggcccgctacttgggcacaagatggctcgcggtgatatgggacccccatttacatgctgaactgaatcatacggttacaagctgtcttagaaataatcactaataagatcggcagagccttgactattctgacccagcaagaaactcagatgagaaatgctgtctatcaaaatagattggctctcgactacttgctagcagctgaaggaggggtctgtgggaaatttaaccttactaattgctgtctacacatagatgatcaggggcaagtagttgaaggcatagggatatgacaaaactggcacatgtgcccgtgcaagtgtatcatggatttgatcctggagccatgtttggaaaatggttcccagtgctaggagagtttaaaactcttataataagagtcataatagtaataggaacctgcttactgctcccttgtttgctacctgtacttcttcaaatgataaaatgcttcatcactaccttagttcaccaaaatgctttagcacaagtgtactatatgaattactatcaatcagtcttgcaagaagacatgggtagtgagaatgaaagtgagaactcccactattgagtgagattctcaaaggggcaga

SEQ ID NO: 923 - DNA, 5301 bp, Homo sapiens
  source 1..5301: mol_type = other DNA
gggaagatggccgaatagaacagctctggtctgcagctcccggcaagatcaacgcagaaggtgggtgatttctgcatttccaactgagcccccactggtgatacccgggcaaacagggtctggagtggacctctagcacctctagcagatctgcagcagaggggcctgttagaaggaagactaacaaacaagaaaggaatagcatcaagaacaacaaaaatggcatccacacagaaaccgcatctgaaggtcaccaacattaaagaccaaaggtagataaatccacaaagatgaggaaaaactaatacaaaaaggctgaaaattccaaacaccagaacacctcttctcctccaaaggatcacaactcctcgccagcaaaggaacaaaagtggacagagaatgagtttgacaaactgacagaagtaggctttagaaggtaggtaacagcaaactcctccgagctaaaggagcatgttctaacccaatgcaaggaagctaagaaccttgaaaaaaattataggaattgctaactagaataaccagtttagagaagaacataaatgacctgatggagctgaaaaacacagcatgaggacttcatgaagcatacaaaagtatcaatagccaaatcaatcaagcagaagaaaggatatcagagattgaagatcaacttaatgaaataaagcaagaagacaagatcaaagaaaaaagaatgaaaagaaacgaacaaagcctccaagaaatatgggactatatgaaaagaccaaacctaagttagattggtgtacctgaaagtgatggggagaatggaacaaagttggaaaatactcttcagggtattctccaggagaacttccccaacctagcaagagaggccaacattcaaattcaggaaatacagagaatgccacaaagatactcctcaagaagagcaaccccaaaacacataatcgtcagattcagcaaggttgaaatgaaggaaaaaatgttaagggaagctggagagacaggtcgggttacctacaaagggaagcccatcagactaacatcagatctctctgcagaaaccctacaaggcagaagagagtggggaccaatattcaacattcttaagcaaaagaattttcaacccagaatttcatatccagccaaactaagcttcataaacaaaggataaataaaatcctttacagagaagaaaatgctgagagattttgtcactaccaggcctgccttataagagctcctgaaggaagcactaaatatggaaagaaaaaactggtaccaaccactgcaaaaacataccaaattgtaaagatcattgacactatgaagaaactgcatcaataaaggggcaaaataactagctagcatcataatgacaggatcagattcacacataacaatattaaccttaaatgtaaatatgctaaatgccccaattaaaagacacagactggcaaattggatagacaaggcccatcggtgtgctgtattcaggagacccatctcacatgcaaagacacacataggctcaaaataaagggatggaagaatatttaccaagcaaatggaaaacaaaaaacaagcaggggttgcaatcctagtttctgataaaacagactttaaaccaacaaagataaaaaaagacaaagaagggcatttcataatggtaaagggatcaatgcaacaagaagaggtaactatcctaaatatatatgcacccactacaggagcacccacattcattaagcaagttcgtagagatctacaaagagacttagactcccacacaataagagtgggagattttgtcaccccactgacaatattagacagattaatgagacagaaaattaacaaggatattcaggacttgaactcagctctagaccaagcagacctaatagacatctacagaactctccatcccaaatgaacagaatatacattcttctcagcaccacattacacttattgtaaaactgaccacataattggaagtaaaacactcctcagtaagtgtaaaagaacagaaatcatagcagtctctgaaaccacagtgcaatcaaattagaactcaggattaagaaactcactcaaaaccatacaaatatagggaaactgaacaacctgctcctgaatgactactgggtatataacgaaattaaggcagaaataaataagttctttgaaaccaatgagaacaaagacacaacataccagaatctctgggacacagctaaagcagtgtttagagagaaatttatagcactaaatcccaataggagaaagcaggaaagctaaaatagacaccctaacatcacaattaaaagaactagagaagcaagagcaaacaaattcaaaagctagcagacgacaagaaataactaagatcagagtagaactgaaggagatagagacacgaggaacacttcaatatctcagtgaatccaggagctggttttttgaaaagatcaacaaaatagatagaccgctagccagattaatgaagaaaaaatagagaagaatcaaatagacacaataagaaatgataaaggggatgtcaccactgatcccacagaaagaaactaccatcagagaatactacaaacacctctatgcaaataaactagaaaatctagaagaaatgggtaaattcctagacacatacaccctcccaagactaaactaggaagaagtcgaatccctgaatagaccaataacaagttctgaaattgaggcagtaattaatagcctaccaaccaaaaaaggcccaggaccagacggattcacagccaaattctaccagaggtacaaagaagagctgataccattctttctgaaactattccaaacaatagaaaaagatggaatattccctaactctttttatgaggccagcatcatcctgataccaaaacctggcagagacaacaaaaaaagaaaatttcaggccaatatcgctgatcaacatagatgcaaaaatcctcgataaaatgtaatccatcacataaacagaacaaatgacaaaaaccacatgattttctcaatagatgcagaaaaggcctttgacaaaattcaacacaccttcatcctaaaaactctcaataaactaggtattgatgtaaagtatctcaaaataataagtgttatttatgacaaacccacagccaatattataccgaatgggcaaaagctggaagcattctctttgaaaactggcacaagacaaggatgccatctctcaccactcctattcatcatagtattggaagttctggccagggcaatcaggcaagagaaagaaataaagtttattcaaataggaagagaggaagttaaattgtctctgtttgcagatgacatgattgtatatttagaaaatcccatcatctcagcccaaaatctccttaagctgataagcaacttcagcaaagtctcaggatacaaaatcaatgtgcaaaaatcacaagcattcctatacaccaataatagacaaacagagatccaaatcatgagtgaactcccattcacaattgctacaaagagaataaaatacctaggaatccaacttacaagcgatgtgaaggacctcttcaaggagaactacaaaccactgctcaaggaaataagagaggacacaaacaaatggaaaaacattctgtgctcatggataggaagaatcagtatcgtgaaaatggacatactgcccaacgtaatttatagattcaatgctatccccatcaagctaccattgactttcttcccagaattagaaaaaagctactttaaatttcatatggaaccaaaaaagagcccgtgtagccaagacaatcctaagcaaaaagaacaaagctggaggcatcccactacctgacttcaaactatactacaaggctacagtaaccaaaacagcatggtactggtaccaaaacagatatatagacaaatggaacagaacagaggcctcagaagtaatgccacacatctacaaccatctgatctttgcccaacctgacaaaaacaagcaatggggaaaggattccttatttaataaatggtgttgggaaaactggctagccatatgcagaaaactgaaactggaccccttccttacaccttatacaaaaattaacttaagatggattaaagacttaaacgtaagacctaaaaccataaaaaccctggaagaaaacctaggcaataccattcaggacacaggcatcggcaaagagttgatgactaacacaccaaaagcaatggcaacaaaagccagaactgacaaatgggatctaattaaactaaagagcttctgcacaccaaaagaaactatcatcagagtgtacaggaatcctacagaatgggagaaaatttttgcaatctgtccatcatacaaagggctaatatccagaatctacaaagaacttaaacaaatttacaagaaaaaaacaaaccaccccatcaaaaagtgtgtgaaggatatgaacagacacttctcaaaagaacacatttatgtgtccaacaaatatatgaaaaaaaagctcatgattactggtcattagagaaatgcaaatcaaaaccacaaggagataccatctcatgccagttagaatggtgatcattaaaaagccaggaaacaacaaatgctggagaggatgtggagaaataggaacacgtttactctgttggtgggtgtataaattagttcaaccactgtggaagacagtgtggtgattcatcaaggatctagaaccagaaataccatttgacccacaatcccattactgggcatatacccaaaggatttataaatcattctactgttaagacacatgcacaggtatgtttattgcagcactgttcacaatagcaaagacttgtaaccaacccaaatgcccatcaatgatagactggataaacaaaatgtggcacatacacaccatggaatactatgtagccattaaaaggatgagttcatgtcctttgcagggacatgcatgaagctggaaaccatcattgccagcaaagtaacacaagaaaagaaaaccaaacaccagatgttctcactcataagtgggaggtgaacaatgagaacacgtggacacagggaggagaacgtcacacaccagggcctttcagggggtggggggctaggggaggcacagcattaggagaaatacctaatgtagatgatgggttgatgggtgcagcaagccaccatggcacgtgtatacttatgtgacaaacctgcatgttctgcacatgtatcccagaactttaagtataaaaaaaaaataa

SEQ ID NO: 924 - DNA, 6030 bp, Homo sapiens
  source 1..6030: mol_type = other DNA
ggggaggagccaagatggccgaataggaacagctccggtctacagctcccagcgtgagcgacgcagaagacggtgatttctgcatttccatctgaggtaccgggttcatctcactagggagtgccagacagtgggcgcaggcgagtgtgtgtgcgcaccgtgcgcgagccgaagcagggcgaggcattgcctcacctgggaagcgcaaggggtcagggagttccctttccgagtcaaagaaaggggtgacggacgcacctggaaaatcgggtcactcccacccgaatattgcgcttttcagaccggcttaagaaacggcgcaccacgagactatatcccacacctggctcggagggtcctacgcccacggaatctcgctgattgctagcacagcagtctgagatcaaactgcaaggcggcaacgaggctgggggaggggcgcccgccattgcccaggcttgcttaggtaaacaaagcagccgggaagctcgaactgggtggagcccaccacagctcaaggaggcctgcctgcctctgtaggctccacctctgggggcagggcacagacaaacaaaaagacagcagtaacctctgcagacttaagtgtccctgtctgacagctttgaagagagcagtggttctcccagcacgcagctggagatctgagaacgggcagactgcctcctcaagtgggtccctgactcctgacccccgagcagcctaactgggaggcaccccccagcaggggcacactgacacctcacacggcagggtattccaacagacctgcagctgagggtcctgtctgttagaaggaaaactaacaaccagaaaggacatctacaccgaaaacccatctgtacatcaccatcatcaaagaccaaaagtagataaaaccacaaagatggggaaaaaacagaacagaaaaactggaaactctaaaacacagagcgcctctcctcctccaaaggaacgcagttcctcaccagcaacagaacaaagctggatggagaatgattttgacgagctgagagaagaaggcttcagacgatcaaattactctgagctacgggaggacattcaaaccaaaggcaaagaagttgaaaactttgaaaaaaatttagaagaatgtataactagaataaccaatacagagaagtgcttaaaggagctgatggagctgaaaaccaaggctcgagaactacgtgaagaatgcagaagcctcaggagccgatgcgatcaactggaagaaagggtatcagcaatggaagatgaaatgaatgaaatgaagcgagaagggaagtttagagaaaaaagaataaaaagaaatgagcaaagcctccaagaaatatgggactatgtgaaaagaccaaatctacgtctgattggtgtacctgaaagtgatgtggagaatggaaccaagttggaaaacactctgcaggatattatccaggagaacttccccaatctagcaaggcaggccaacgttcagattcaggaaatacagagaacgccacaaagatactcctcgagaagagcaactccaagacacataattgtcagattcaccaaagttgaaatgaaggaaaaaatgttaagggcagccagagagaaaggtcgggttaccctcaaaggaaagcccatcagactaacagcggatctctcggcagaaaccctacaagccagaagagagtgggggccaatattcaacattcttaaagaaaagaattttcaacccagaatttcatatccagccaaactaagcttcataagtgaaggagaaataaaatactttatagacaagcaaatgttgagagattttgtcaccaccaggcctgccctaaaagagctcctgaaggaagcgctaaacatggaaaggaacaaccagtaccagccgctgcaaaatcatgccaaaatgtaaagaccatcgagactaggaagaaactgcatcaactaatgagcaaaatcaccagctaacatcataatgacaggatcaaattcacacataacaatattaactttaaatataaatggactaaattctgcaattaaaagacacagactggcaagttggataaagagtcaagacccatcagtgtgctgtattcaggaaacccatctcacgtgcagagacacacataggctcaaaataaaaggatggaggaagatctaccaagccaatggaaaacaaaaaaaggcaggggttgcaatcctagtctctgataaaacagactttaaaccaacaaagatcaaaagagacaaagaaggccattacataatggtaaagggatcaattcaacaagaggagctaactatcctaaatatttatgcacccaatacaggagcacccagattcataaagcaagtcctcagtgacctacaaagagacttagactcccacacattaataatgggagactttaacaccccactgtcaacattagacagatcaacgagacagaaagtcaacaaggatacccaggaattgaactcagctctgcaccaagcagacctaatagacatctacagaactctccaccccaaatcaacagaatatacatttttttcagcaccacaccacacctattccaaaattgaccacatagttggaagtaaagctctcctcagcaaatgtaaaagaacagaaattataacaaactatctctcagaccacagtgcaatcaaactagaactcaggattaagaatctcactcaaagccgctcaactacatggaaactgaacaacctgctcctgaatgactactgggtacataacgaaatgaaggcagaaataaagatgttctttgaaaccaacgagaacaaagacaccacataccagaatctctgggacgcattcaaagcagtgtgtagagggaaatttatagcactaaatgcctaccagagaaagcaggaaagatccaaaattgacaccctaacatcacaattaaaagaactagaaaagcaagagcaaacacattcaaaagctagcagaaggcaagaaataactaaaatcagagcagaactgaaggaaatagagacacaaaaaacccttcaaaaaatcaatgaatccaggagctggttttttgaaaggatcaacaaaattgatagaccgctagcaagactaataaagaaaaaaagagagaagaatcaaatagacacaataaaaaatgataaaggggatatcaccaccgatcccacagaaatacaaactaccatcagagaatactacaaacacctctacgcaaataaactagaaaatctggaagaaatggatacattcctcgacacatacactctcccaagactaaaccaggaagaagttgaatctctgaatcgaccaataacaggctctgaaattgtggcaataatcaatagtttaccaaccaaaaagagtccaggaccagatggattcacagccgaattctaccagaggtacaaggaggaactggtaccattccttctgaaactattccaatcaatagaaaaagagggaatcctccctaactcattttatgagaccagcatcattctgataccaaagccgggcagagacacaaccaaaaaagagaattttagaccaatatccttgatgaacattgatgcaaaaatcctcaataaaatactggcaaaccgaatccagcagcacatcaaaaagcttatccaccatgatcaagtgggcttcatccctgggatgcaaggctggttcaatatacgcaaatcaataaatgtaatccagcatataaacagagccaaagacaaaaaccacatgattatctcaatagatgcagaaaaagcctttgacaaaattcaacaacccttcatgctaaaaactctcaataaattaggtattgatgggacgtatttcaaaataataagagctatctatgacaaacccacagccaatatcatactgaatggacaaaaactggaagcattccctttgaaaactggcacaagacagggatgccctctctcaccgctcctattcaacatagtgttggaagttctggccagggcaatcaggcaggagaaggaaataaagggtattcaattaggaaaagaggaagtcaaattgtccctgtttgcagacgacatgattgtttatctagaaaaccccatcgtctcagcccaaaatctccttaagctgataagcaacttcagcaaagtctcaggatacaaaatcaatgtacaaaaatcacaagcattcttatacaccaacaacagacaaacagagagccaaatcatgagtgaactcccattcacaattgcttcaaagagaataaaatacctaggaatccaacttacaagggatgtgaaggacctcttcaaggagaactacaaaccactgctcaaggaaataaaagaggagacaaacaaatggaagaacattccatgctcatgggtaggaagaatcaatatcgtgaaaatggccatactgcccaaggtaatttacagattcaatgccatccccatcaagctaccaatgactttcttcacagaattggaaaaaactactttaaagttcatatggaaccaaaaaagagcccgcattgccaagtcaatcctaagccaaaagaacaaagctggaggcatcacactacctgacttcaaactatactacaaggctacagtaaccaaaacagcatggtactggtaccaaaacagagatatagatcaatggaacagaacagagccctcagaaataatgccgcatatctacaactatctgatctttgacaaacctgagaaaaacaagcaatggggaaaggattccctgtttaataaatggtgctgggaaaactggctagccatatgtagaaagctgaaactggatcccttccttacaccttatacaaaaatcaattcaagatggattaaagatttaaacgttaaacctaaaaccataaaaaccctagaagaaaacctaggcattaccattcaggacataggcgtgggcaaggacttcatgtccaaaacaccaaaagcaatggcaacaaaagacaaaattgacaaatgggatctaattaaactaaagagcttctgcacagcaaaagaaactaccatcagagtgaacaggcaacctacaacatgggagaaaatttttgcaacctactcatctgacaaagggctaatatccagaatctacaatgaactcaaacaaatttacaagaaaaaaacaaacaaccccatcaaaaagtgggcgaaggacatgaacagacacttctcaaaagaagacatttatgcagccaaaaaacacatgaagaaatgctcatcatcactggccatcagagaaatgcaaatcaaaaccactatgagatatcatctcacaccagttagaatggcaatcattaaaaagtcaggaaacaacaggtgctggagaggatgcggagaaataggaacacttttacactgttggtgggactgtaaactagttcaaccattgtggaagtcagtgtggcgattcctcagggatctagaactagaaataccatttgacccagccatcccattactgggtatatacccaaatgagtataaatcatgctgctataaagacacatgcacacgtatgtttattgcggcactattcacaatagcaaagacttggaaccaacccaaatgtccaacaatgatagactggattaagaaaatgtggcacatatacaccatggaatactatgcagccataaaaaatgatgagttcatatcctttgtagggacatggatgaaattggaaaccatcattctcagtaaactatcgcaagaacaaaaaaccaaacaccgcatattctcactcataggtgggaattgaacaatgagatcacatggacacaggaaggggaatatcacactctggggactgtggtggggtcgggggaggggggagggatagcattgggagatatacctaatgctagatgacacattagtgggtgcagcgcaccagcatggcacatgtatacatatgtaactaacctgcacaatgtgcacatgtaccctaaaacttagagtataataaaaaaaaaaaaa

SEQ ID NO: 925 - DNA, 6024 bp, Homo sapiens
  source 1..6024: mol_type = other DNA
gggaggagccaagatggccgaataggaacagctccggtctacagctcccagcgtgagcgacgcagaagacggtgatttctgcatttccatctgaggtaccgggttcatctcactagggagtgccagacagtgggcgcaggccagtgtgtgtgcgcaccgtgcgcgagccgaagcagggcgaggcattgcctcacctgggaagcgcaaggggtcagggagttccctttccgagtcaaagaaaggggtgacggacgcacctggaaaatcgggtcactcccacccgaatattgcgcttttcagaccggcttaagaaacggcgcacgacgagactatatcccacacctggctcggagggtcctacgcccacggaatctcgctgattgctagcacagcagtctgagatcaaactgcaaggcggcaacgaggctgggggaggggcgcccgccattgcccaggcttgcttaggtaaacaaagcagccgggaagctcgaactgggtggagcccaccacagctcaaggaggcctgcctgcctctgtaggctccacctctgggggcagggcacagacaaacaaaaagacagcagtaacctctgcagacttaagtgtccctgtctgacagctttgaagagagcagtggttctcccagcacgcagctggagatctgagaacgggcagtctgcctcctcaagtgggtccctgactcctgacccccgagcagcctaactgggaggcaccccccagcaggggcacactgacacctcacacggcagggtattccaacagacctgcagctgagggtcctgtctgttagaaggaaaactaacaaccagaaaggacatctacaccgaaaacccatctgtacatcaccatcatcaaagaccaaaagtagataaaaccacaaagatggggaaaaaacagaacagaaaaactggaaactctaaaacgcagagcgcctctcctcctccaaaggaacgcagttcctcaccagcaacagaacaaagctggatggagaatgattttgacgagctgagagaagaaggcttcagacgatcaaattactctgagctacgggaggacattcaaaccaaaggcaaagaagttgaaaactttgaaaaaaatttagaagaatgtataactagaataaccaatacagagaagtgcttaaaggagctgatggagctgaaaaccaaggctcgagaactacgtgaagaatgcagaagcctcaggagccgatgcgatcaactggaagaaagggtatcaccaatggaagatgaaatgaatgaaatgaagcgagaagggaagtttagagaaaaaagaataaaaagaaatgagcaaagcctccaagaaatgtgggactatgtgaaaagaccaaatctacgtctgattggtgtacctgaaagtgatgtggagaatggaaccaagttggaaaacactctgcaggatattatccaggagaacttccccaatctagcaaggcaggccaacgttcagattcaggaaatacagagaacgccacaaagatactcctcgagaagagcaactccaagacacataattgtcagattcaccaaagttgaaatgaaggaaaaaatgttaagggcagccagagagaaaggtcgggttaccctcaaaggaaagcccatcagactaacagcggatctctcggcagaaaccctacaagccagaagagagtgggggccaatattcaacattcttaaagaaaagaattttcaacccagaatttcatatccagccaaactaagcttcataagtgaaggagaaataaaatactttatagacaagcaaatgttgagagattttgtcaccaccaggcctgccctaaaagagctcctgaaggaagcgctaaacatggaaaggaacaactggtaccagccgctgcaaaatcatgccaaaatgtaaagaccatcgagactaggaagaaactgcatcaactaatgagcaaaatcaccagctaacatcataatgacaggatcaaattcacacataacaatattaactttaaatataaatggactaaattctgcaattaaaagacacagactggcaagttggataaagagtcaagacccatcagtgtgctgtattcaggaaacccatctcacgtgcagagacacacataggctcaaaataaaaggatggaggaagatctaccaagccaatggaaaacaaaaaaaggcaggggttgcaatcctagtctctgataaaacagactttaaaccaacaaagatcaaaagagacaaagaaggccattacataatggtaaagggatcaattcaacaagaggagctaactatcctaaatatttatgcacccaatacaggagcacccagattcataaagcaagtcctcagtgacctacaaagagacttagactcccacacattaataatgggagactttaacaccccactgtcaacattagacagatcaacgagacagaaagtcaacaaggatacccaggaattgaactcagctctgcaccaagcagacctaatagacatctacagaactctccaccccaaatcaacagaatatacatttttttcagcaccacaccacacctattccaaaattgaccacatagttggaagtaaagctctcctcagcaaatgtaaaagaacagaaattataacaaactatctctcagaccacagtgcaatcaaactagaactcaggattaagaatctcactcaaagccgctcaactacatggaaactgaacaacctgctcctgaatgactactgggtacataacgaaatgaaggcagaaataaagatgttctttgaaaccaacgagaacaaagacaccacataccagaatctctgggacgcattcaaagcagtgtgtagagggaaatttatagcactaaatgcctacaagagaaagcaggaaagatccaaaattgacaccctaacatcacaattaaaagaactagaaaagcaagagcaaacacattcaaaagctagcagaaggcaagaaataactaaaatcagagcagaactgaaggaaatagagacacaaaaaacccttcaaaaaatcaatgaatccaggagctggttttttgaaaggatcaacaaaattgatagaccgctagcaagactaataaagaaaaaaagagagaagaatcaaatagacacaataaaaaatgataaaggggatatcaccaccgatcccacagaaatacaaactaccatcagagaatactacaaacacctctacgcaaataaactagaaaatctagaagaaatggatacattcctcgacacatacactctcccaagactaaaccaggaagaagttgaatctctgaatagaccaataacaggctctgaaattgtggcaataatcaatagtttaccaaccaaaaagagtccaggaccagatggattcacagccgaattctaccagaggtacatggaggaactggtaccattccttctgaaactattccaatcaatagaaaaagagggaatcctccctaactcattttatgaggccagcatcatgctgataccaaagccgggcagagacacaaccaaaaaagagaattttagaccaatatccttgatgaacattgatgcaaaaatcctcaataaaatactggcaaaccgaatccagcagcacatcaaaaagcttatccaccatgatcaagtgggcttcatccctgggatgcaaggctggttcaatatacgcaaatcaataaatgtaatccagcatataaacagagccaaagacaaaaaccacatgattatctcaatagatgcagaaaaagcctttgacaaaattcaacaacccttcatgctaaaaactctcaataaattaggtattgatgggacgtatttcaaaataataagagctatctatgacaaacccacagccaatatcatactgaatgggcaaaaactggaagcattccctttgaaaaccggcacaagacagggatgccctctctcaccgctcctattcaacatagtgttggaagttctggccagggcaatcaggcaggagaaggaaataaagggtattcaattaggaaaagaggaagtcaaattgtccctgtttgcagacgacatgattgtttatctagaaaaccccatcgtctcagcccaaaatctccttaagctgataagcaacttcagcaaagtctcaggatacaaaatcaatgtacaaaaatcacaagcattcttatacaccaacaacagacaaacagagagccaaatcatgggtgaactcccattcacaattgcttcaaagagaataaaatacctaggaatccaacttacaagggatgtgaaggacctcttcaaggagaactacaaaccactgctcaaggaaataaaagaggagacaaatggaagaacattccatgctcatgggtaggaagaatcaatatcgtgaaaatggccatactgcccaaggtaatttacagattcaatgccatccccatcaagctaccaatgactttcttcacagaattggaaaaaactactttaaagttcatatggaaccaaaaaagagcccgcattgccaagtcaatcctaagccaaaagaacaaagctggaggcatcacactacctgacttcaaactatactacaaggctacagtaaccaaaacagcatggtactggtaccaaaacagagatatagatcaatggaacagaacagagccctcagaaataatgccgcatatctacaactatctgatctttgacaaacctgagaaaaacaagcaatggggaaaggattccctatttaataaatggtgctgggaaaactggctagccatatgtagaaagctgaaactggatcccttccttacaccttatacaaaaatcaattcaagatggattaaagatttaaacgttaaacctaaaaccataaaaaccctagaagaaaacctaggcattaccattcaggacataggcatgggcaaggacttcatgtccaaaacaccaaaagcaatggcaacaaaagacaaaattgacaaatgggatctaattaaactaaagagcttctgcacagcaaaagaaactaccatcagagtgaacaggcaacctacaacatgggagaaaattttcgcaacctactcatctgacaaagggctaatatccagaatctacaatgaactcaaacaaatttacaagaaaaaaacaaacaaccccatcaaaaagtgggcgaaggacatgaacagacacttctcaaaagaagacatttatgcagccaaaaaacacatgaagaaatgctcatcatcactggccatcagagaaatgcaaatcaaaaccactatgagatatcatctcacaccagttagaatggcaatcattaaaaagtcaggaaacaacaggtgctggagaggatgtggagaaataggaacacttttacactgttggtgggactgtaaactagttcaaccattgtggaagtcagtgtggcgattcctcagggatctagaactagaaataccatttgacctagccatcccattactgggtatatacccaaatgagtataaatcatgctgctataaagacacatgcacacgtatgtttattgcggcactattcacaatagcaaagacttggaaccaacccaaatgtccaacaatgatagactggattaagaaaatgtggcacatatacaccatggaatactatgcagccataaaaaattatgagttcatatcctttgtagggacatggatgaaattggaaaccatcattctcagtaaactatcgcaagaacaaaaaaccaaacaccgcatattctcactcataggtgggaattgaacaatgagatcacatggacacaggaaggggaatatcacactctggggactgtggtggggtcgggggaggggggagggatagcattgggagatatacctaatgctagatgacacattagtgggtgcagcgcaccagcatggcacatgtatacatatgtaactaacctgcacaatgtgcacatgtaccctaaaacttagagtataataaaaaaaaaaaa

SEQ ID NO: 926 - DNA, 6225 bp, Homo sapiens
  source 1..6225: mol_type = other DNA
gagggaggagccaagatggccgaataggaacagctccggtctacagctcccagcgtgagcgacgcagaagacggtgatttctgcatttccatctgaggtaccgggttcatctcactagggagtgccagacagtgggcgcaggccagtgtgtgtgcgcaccgtgcgcgagccgaagcagggcgaggcattgcctcacctgggaagcgcaaggggtcagggagttccctttccgagtcaaagaaaggggtgacggacgcacctggaaaatcgggtcactcccacccgaatattgcgcttttcagaccggcttaagaaacggcgcaccacgagactatatcccacacctggctcggagggtcctacgcccacggaatctcgctgattgctagcacagcagtctgagatcaaactgcaaggcggcaacgaggctgggggaggggcgcccgccattgcccaggcttgcttaggtaaacaaagcagccgggaagctcgaactgggtggagcccaccacagctcaaggaggcctgcctgcctctgtaggctccacctctgggggcagggcacagacaaacaaaaagacagcagtaacctctgcagacttaagtgtccctgtctgacagctttgaagagagcagtggttctcccagcacgcagctggagatctgagaacgggcagactgcctcctcaagtgggtccctgactcctgacccccgagcagcctaactgggaggcaccccccagcaggggcacactgacacctcacacggcagggtattccaacagacctgcagctgagggtcctgtctgttagaaggaaaactaacaaccagaaaggacatctacaccgaaaacccatctgtacatcaccatcatcaaagaccaaaagtagataaaaccacaaagatggggaaaaaacagaacagaaaaactggaaactctaaaacgcagagcgcctctcctcctccaaaggaacgcagttcctcaccagcaacagaacaaagctggatggagaatgattttgacgagctgagagaagaaggcttcagacgatcaaattactctgagctacgggaggacattcaaaccaaaggcaaagaagttgaaaactttgaaaaaaatttagaagaatgtataactagaataaccaatacagagaagtgcttaaaggagctgatggagctgaaaaccaaggctcgagaactacgtgaagaatgcagaagcctcaggagccgatgcgatcaactggaagaaagggtatcagcaatggaagatgaaatgaatgaaatgaagcgagaagggaagtttagagaaaaaagaataaaaagaaatgagcaaagcctccaagaaatatgggactatgtgaaaagaccaaatctacgtctgattggtgtacctgaaagtgatgtggagaatggaaccaagttggaaaacactctgcaggatattatccaggagaacttccccaatctagcaaggcaggccaacgttcagattcaggaaatacagagaacgccacaaagatactcctcgagaagagcaactccaagacacataattgtcagattcaccaaagttgaaatgaaggaaaaaatgttaagggcagccagagagaaaggtcgggttaccctcaaaggaaagcccatcagactaacagcggatctctcggcagaaaccctacaagccagaagagagtgggggccaatattcaacattcttaaagaaaagaattttcaacccagaatttcatatccagccaaactaagcttcataagtgaaggagaaataaaatactttatagacaagcaaatgttgagagattttgtcaccaccaggcctgccctaaaagagctcctgaaggaagcgctaaacatggaaaggaacaaccggtaccagccgctgcaaaatcatgccaaaatgtaaagaccatcgagactaggaagaaactgcatcaactaatgagcaaaatcaccagctaacatcataatgacaggatcaaattcacacataacaatattaactttaaatataaatggactaaattctgcaattaaaagacacagactggcaagttggataaagagtcaagacccatcagtgtgctgtattcaggaaacccatctcacgtgcagagacacacataggctcaaaataaaaggatggaggaagatctaccaagccaatggaaaacaaaaaaaggcaggggttgcaatcctagtctctgacaaaacagactttaaaccaacaaagatcaaaagagacaaagaaggccattacataatggtaaagggatcaattcaacaagaggagctaactatcctaaatatttatgcacccaatacaggagcacccagattcataaagcaagtcctcagtcacctacaaagagacttagactcccacacattaataatgggagactttaacaccccactgtcaacattagacagatcaacgagacagaaagtcaacaaggatacccaggaattgaactcagctctgcaccaagcagacctaatagacatctacagaactctccaccccaaatcaacagaatatacatttttttcagcaccacaccacacctattccaaaattgaccacatagttggaagtaaagctctcctcagcaaatgtaaaagaacagaaattataacaaactatctctcagaccacagtgcaatcaaactagaactcaggattaagaatctcactcaaagccgctcaactacatggaaactgaacaacctgctcctgaatgactactgggtacataacgaaatgaaggcagaaataaagatgttctttgaaaccaacgagaacaaagacaccacataccagaatctctgggacgcattcaaagcagtgtgtagagggaaatttatagcactaaatgcctacaagagaaagcaggaaagatccaaaattgacaccctaacatcacaattaaaagaactagaaaagcaagagcaaacacattcaaaagctagcagaaggcaagaaataactaaaatcagagcagaactgaaggaaatagagacacaaaaaacccttcaaaaaatcaatgaatccaggagctggttttttgaaaggatcaacaaaattgatagaccgctagcaagactaataaagaaaaaaagagagaagaatcaaatagacacaataaaaaatgataaaggggatatcaccaccgatcccacagaaatacaaactaccatcagagaatactacaaacacctctacgcaaataaactagaaaatctagaagaaatggatacattcctcgacacatacactctcccaagactaaaccaggaagaagttgaatctctgaatcgaccaataacaggctctgaaattgtggcaataatcaatagtttaccaaccaaaaagagtccaggaccagatggattcacagccgaattctaccagaggtacaaggaggaactggtaccattccttctgaaactattccaatcaatagaaaaagagggaatcctccctaactcattttatgaggccagcatcattctgataccaaagccgggcagagacacaaccaaaaaagagaattttagaccaatatccttgatgaacattgatgcaaaaatcctcaataaaatactggcaaaccgaatccagcagcacatcaaaaagcttatccaccatgatcaagtgggcttcatccctgggatgcaaggctggttcaatatacgcaaatcaataaatgtaatccagcatataaacagagccaaagacaaaaaccacatgattatctcaatagatgcagaaaaagcctttgacaaaattcaacaacccttcatgctaaaaactctcaataaattaggtattgatgggatgtatttcaaaataataagagctatctatgacaaacccacagccaatatcatactgaatgggcaaaaactggaagcattccctttgaaaactggcacaagacagggatgccctctctcaccgctcctattcaacatagtgttggaagttctggccagggcaatcaggcaggagaaggaaataaagggtattcaattaggaaaagaggaagtcaaattgtccctgtttgcagacgacatgattgtttatctagaaaaccccatcgtctcagcccaaaatctccttaagctgataagcaacttcagcaaagtctcaggatacaaaatcaatgtacaaaaatcacaagcattcttatacaccaacaacagacaaacagagagccaaatcatgggtgaactcccattcacaattgcttcaaagagaataaaatacctaggaatccaacttacaagggatgtgaaggacctcttcaaggagaactacaaaccactgctcaaggaaataaaagaggagacaaataaatggaagaacattccatgctcatgggtaggaagaatcaatatcgtgaaaatggccatactgcccaaggtaatttacagattcaatgccatccccatcaagctaccaatgactttcttcacagaattggaaaaaactactttaaagttcatatggaaccaaaaaagagcccgcatcgccaagtcaatcctaagccaaaagaacaaagctggaggcatcacactacctgacttcaaactatactacaaggctacagtaaccaaaacagcatggtactggtacaaaaacagagatatagatcaatggaacagaacagagccctcagaaataatgccgcatatctacaactatctgatctttgacaaacctgagaaaaacaagcaatggggaaaggattccctatttaataaatggtgctgggaaaactggctagccatatgtagaaagctgaaactggatcccttccttacaccttatacaaaaatcaattcaagatggattaaagatttaaatgttaaacctaaaaccataaaaaccctagaagaaaacctaggcattaccattcaggacataggcgtgggcaagcacttcatgtccaaaacaccaaaagcaatggcaacaaaagacaaaattgacaaatgggatctaattaaactaaagagcttctgcacagcaaaagaaactaccatcagagtgaacaggcaacctacaacatgggagaaaatttttgcaacctactcatctgacaaagggctaatatccagaatctacaatgaactcaaacaaatttacaagaaaaaaacaaacaaccccatcaaaaagtgggcgaaggacatgaacagacacttctcaaaagaagacatttatgcagccaaaaaacacatgaagaaatgctcatcatcactggccatcagagaaatgcaaatcaaaaccactatgagatatcatctcacaccggttagaatggcaatcattaagaagtcaggaaacaacaggtgctggagaggatgcggagaaataggaacacttttacactgttggtgggactgtaaactagttcaaccattgtggaagtcagtgtggcgattcctcagggatctagaactagaaataccatttgacccagccatcccattactgggtatatacccaaatgagtataaatcatgctgctataaagacacatgcacacgtatgtttattgcggcactattcacaatagcaaagacttggaaccaacccaaatgtccaacaatgatagactggattaagaaaatgtggcacatatacaccatggaatactatgcagccataaaaaatgatgagttcatatcctttgtagggacatggatgaaattggaaaccatcattctcagtaaactatcgcaagaacaaaaaaccaaacaccgcatattctcactcataggtgggaattgaacaatgagatcacatggacacaggaaggggaatatcacactctggggactgtggtggggtcgggggaggggggagggatagcattgggagatatacctaatgctagatgacacattagtgggtgcagcgcacaagcatggcacatgtatacatatgtaactaacctgcacaatgtgcacatgtaccctaaaacttagagtataataaaaaaaaaaaaaaaaaaaaaaaaaaacacattaaaaaaaaaaaaaacaacaaaacaaagcaaacatggaaatgtttgttattttaattgttatgatggtttcatggctgtttgcatgtgtcaaaactcatcaaatttgtgtacgttaaatatgtgaaacttattgtatgctggttacacctcaataaagctgttaaatttaaaaaa

SEQ ID NO: 927 - DNA, 5678 bp, Homo sapiens
  source 1..5678: mol_type = other DNA
catccgcagcaagacctgcccaaagagagtctgagctcagacatacctagccctaccccccacctgatgggcctttcctatccactctggcagctgaagacaaagggcatataatcttgggagttctagggccctgcccactgccagttcctctccatactaccacagctgatgctttctggaaagcgccccctcccggcaggatgccaaccagcacaaaaatagagcattaagccaccaaagctaagaaccctcacagagtccatttcactccccctgccacctccactggaacaggcgctggtatccacggctgagagacccatagaaagttcacatcacaggactctgtgcagacaatccccagtaccagcccagagcttggcagactagctgggtggctagacccagaagagagacaataatcactacagcttggctcacaggaagccacagccataggaaaagggggagagtactacatcgagggaacacaccatggaacaaaagaatctgaacaacagccttcagccctagaccttccctctgacagagcctacccagatgagaagaaatcagaaaaccaactctggtaacatgacaaaacaaggctctttaacaccccccaaaaattacactagttcaccagcaatggacccaaagcaagaaggaatccctgttttaccagaaaaagaattcaggagattaattattaaggtaataagggaggcaccagagaaaggtgaagccaaatgtaaagaaatccaaaaaatgatacaagaagtgaagggagagatattcaaggaaatagatagcataaataaaagacaatcaaaacttcaggaaacaatggacacatttatagaaatgcaaaattctgtggaaagtctcatcaatagaattggacaagtagaataaagggattcagagctcgaagacaaggtatttgaattaagccaatccaacagagacaaagaaaaaagaataagaaaatatgaacaaagcctccaagaagtctggaattatgttaagcaaccaaacctaagaataatcagcattcctgaggaagaagagaaatctaaaagtttggaaaacatatttggggaaataatcaagaaaaacttccctagccttgctagagacctggacattcaaatacaagaagcacaaagaacacttgggaaattcatcgcaaacagatcactgcctaggcacattgtcatcaggttatctaaagttaagacgaaggaaagaatcttaagagctgtgagacagaagcatcaggtaacctataaaggaaaacctgtcagattaacagcagattttttagcagaaaccctaccagatagaatagattggggccctatcttcaacctcctcaaacaaaacaattatcggccaagaattttgtatccagtgaaactaagcatcgtatttgaagaaaagatacagtctttttcagataaacaaatgcagagagaattcaccactaccaagacaccactgcaagaactgctaaaaggagctctaaatcttgaaacaaatcctggaaacacatcaaaacagaacctctttaaagcataaatcacacaggatatataaaacaaaaatacaagttaaaaagcaaaaacaaaaaacaaggtacacaggcaacaaatagcgtgatgaatgcaatggtacctcatatctcaatactaacattgaatgtaaatggcctaaatgctccacttaaaagatacggaactgcagaatggataaaaactcactaaccaactatctactgccttcaggagactcacttaacacataaggactcgcataaatttaaagtaaagggatggaaaaaggcattaatgcaaatggacaccaaaagcgagcaggggtagctattcttgtatcagataaaaccactttaaagcaacagcagttgaaagagacaaagaggaacattatataatggtaaaaggctttgtccaacaggaaaatatcacaatcctaaacatacttgcacctaacactggagctcccaatttacaaaacaattactaacagacctaacaaatgagatagacagcaagacaataatagtgcgggacttcaatactccactgacagcactagacaggtcatcaagacagcaaatcaacaaagagacaatggatataactacgccttggagcaaatggacttaacagatatgtacagaagattccaccgaacaaccacaaaatacacattctatacaacagcgcatgaaactttctccaagataggccatggaatgagcctcaataaatttaagaaaattaaaattatatcaagcactctctcagactaaagtggaataaaactggaaatcaactccaaaaaaacccttcaaaaccatgcaaatacatggaaattaaatagcctactcctgaatgagcattgggtcaaaagtgaaattaagatgaaaattaaaaaattatttgaactgaacgacaataatgacacaacccatcaaaaccttggggatacagcaaaggtggtgctaagaggaacgttcatagtcccaaagcccacatcaaaaagactgacagagtacacactggcattctaaggtcacatctcaaggaactagagaaacaagaacaaaccaaaccaaaacccagcagaagaaaagaaattaccaagatcagattagaactaaatgaaattgaaacaaaaaaaatacaaaagataaatgaaaccaaaggctggttctttgaaaagataaataaaattgatagaccattagcaagattaaccaataaaagaagagagaaaatccaaataacctcagtaagaaacgaaacaggagatagtgcagctgacaccactgaaatgcaaatgagccttcaaggctactatgaacacctttacgcacataaactagaaaacctagaagagatgaataaattcctggaaaaatacaatcttcctaacttaaattgtgaagaattagataccccgaacagaccaataacaagcagcgagattgagttggtaattaaaaaattaccaacaaaaaaatccaggaccagacggattaacagcagaattctaccagacattcaaagaattggtaccaatccttttgacactattccacgagatagagaaagaagggaccctccctaattcattccatacagccagtatcaccctaataccaaaaccagaaaaggacataaccagaaaagaaaactatagatggatatccttgatgaacatagatgctgaaatccttaagaaaatactaactaactgaatccaacaacatatcaaaaagataatccaccacgatcaagtgggtttcataccagggatgcagggatggtttaacatacacaagtcaataaatgagatacaccacataaacggaattaaaaacaaaaatcacatgatcatctcaatagatgcagtgaaagcattggacaaaatccagcatcccttgctgattaaagctcagcaaaatcggcatacaagggacattccttaatgtaataaaagccatctatgacaaacctgcagccaacataatactgaatggggaaaatttgaaagcattccctctgagaactggaacaaggcaaggatgcccactctcaccactcctcttcaccatagtactggaagtcctagccagagcaatcaaacaagagaaagaaataaaggcattcaaatcagtaaacaggaagtcaaactgttgctgtttgctgaataatatgattgtatacctagaaaaccccaaaagagtcctccaaaaagattctagaactgatgaaagaattcagcaaaatttccagatgcaaaattaatgtacacaaatcagtagctctcctatacaccaacagtgactaagctgagaatcaaatcaagaactcaaccctttttacaatagatgccaaaaaataaaatacttaggaatatacctaaccaaggaggcaaaagacctctacaaggaaatctacaaaacactcctgaaagaaaccatagacgacacaagcaaatggaaacacatcccatgctcatggattgggcagaatcaatattgtgaatatgaccgtactgacaaaagcaatctacaaattcaatgcaatccccatcaaataccactgtcattcttcacagaaataggaaaacaattctaaaattcttatggaacaaaaaaaagagcccgcatagccaaagcaagactaagcaaaaagaacaaatctggaggcatcacactacctgatttcaaactatactataagtccatagtcaccgaaacagcatcatactgttataaaaataggcacatagaccagtggaacagaatagagaacccagaaataaacccaaatacttacagccaactgatctccgacaaagcaaacaaaaacataaagtggggaaaggacaccgtttacaacaaatggtgctgcgataattggctagccgcatgtagaagaatgaaactggatccttatctctcaccttatacaaaaatcaactcaagatggattaaggacttaagacctgaaactataaaaattctagaatataacattggaaaaacccttctagacattggcttaggcaaggatttcatgatcaagaacccaaaagaaaatgcaataaaaacaaagataaatagttgggacttaattaaactaaagagcttttgcacagcaaaaggaacagtcagcagagtaaacagacaacccacagagtgggagaaaaccttcacaatctatacatctgacaaagaactaatattcagaatctacaatgaactcaaacaaatcagtaagaaacaaacaaacaatcccatcaaaaagtgggttaaggacatgaatagacaattctcaaaagaagatatacaaatggccaacaaacatatgaaataatactcaacatcactaatgatcagggaaatgcaaatcaaaaccacaatgtgatatcactttactcctgcaacaatggccataataacaaaatgaaaaaacagtagatgttggcatggatgcagtgatcagggaacacttctaccctgctggtgggaatgtaaactgatatatccactgtggaaaacagtgtggagattcattaaagaactaaaagtaggactactatttgatcctgcaatcccgctgctgggtatctacccagaggaaaagaagtcattattcaaaaaagatacttggacttgcatgtttatagcagcacaattcacaattgcaaaatcatggagccaacccaaatgcccatcagtcaacgagtggatgaagaaactgttgtatatatatacgatggaatactactcagccataaaaaggaatgaattaacagcattcacagtgacctggatgagattggagacttcttctaagtgaagtaactcaggaatggaaaaccaaacactgtatgttctcactgatatgtggcagctaagctacaaggttgcaaaggcataagaatgatacaatggactttgaggacttggggggaagagtgggagggtgtgagggataaaaggctacaattagggtgcagtgtatactgcttggtgtatactgcagtgtatactgcaccaaaatctcacaaatcaccactaaagaacttacttatgtaaccaaataccacctgtaccccaataacatatgggaaaaaaa

SEQ ID NO: 928 - DNA, 6032 bp, Homo sapiens
  source 1..6032: mol_type = other DNA
gaggaggagccaagatggccgaataggaacagctccggtctacagctcccagcgtgagcgacgcagaagacgggtgatttctgcatttccatctgaggtaccgggttcatctcactagagagtgccagacagtgggcgcaggccagtgtgtgtgcgcaccgtgcgcaagccgaagcagggcgaggcattgcctcacctgggaagcgcaaggggtcagggagttccctttccgagtcaaagaaaggggtgacggacgcacctggaaaatcgggtcactcccacccgaatattgcgcttttcagaccggcttaagaaacggcgcaccacgagactatatcccacacctggctcagagggtcctacgcccacggaatctcgctgattgctagcacagcagtctgagatcaaactgcaaggcggcaacgaggctgggggaggggcgcccgccattgcccaggcttgcttaggtaaacaaagcagctgggaagctcgaactgggtggagcccaccacagctcaaggaggcctgcctgcctctgtaggctccacctctgggggcagggcacagacaaacaaaaagacagcagtaacctctgcagacttaagtgtccctgtctgacagctttgaagagagcagtggttctcccagcacgcagctggagatctgagaacggacagactgcctcctcaagtgggtccctgacccctgacccccgagcagcctaactgggaagcaccccccagcaggggcacactgacacctcacacggcagtgtattccaacagacctgcagctgagggtcctgtctgttagaaggaaaactaacaaccagaaaggacatctacaccgaaaacccatctgtacatcaccatcatcaaagaccaaaagtagataaaaccacaaagatggggaaaaaacagaacagaaaaactggaaactctaaaacgcagagcgcctctcctcctccaaaggaacgcagttcctcaccagcaacagaacaaagctggatggagaatgattttgacgagctgagagaagaaggcttcagacgatcaaattactctgagctacgggaggacattcaaaccaaaggcaaagaagttgaaaactttgaaaaaaatttagaagaatgtataactagaataaccaatacagagaagtgcttaaaggagctgatggagctgaaaaccaaggctcgagaactacgtgaagaatgcagaagcctcaggagccgatgcgatcaactggaagaaagggtatcagcaatggaagatgaaatgaatgaaatgaagcgagaagggaagtttagagaaaaaagaataaaaagaaatgagcaaagcctccaagaaatatgggactatgtgaaaagaccaaatctacgtctgattggtgtacctgaaagtgatgtggagaatggaaccaagttggaaaacactctgcaggatattatccaggagaacttccccaatctagcaaggcaggccaacgttcagattcaggaaatacagagaacgccacaaagatactcctcgagaagagcaactccaagacacataattgtcagattcaccaaagttgaaatgaaggaaaaaatgttaagggcagccagagagaaaggtcgggttaccctcaaaggaaagcccatcagactaacagcggatctctcggcagaaaccctataagccagaagagagtgggggccaatattcaacattcttaaagaaaagaattttcaacccagaatttcatatccagccaaactaagcttcataagtgaaggagaaataaaatactttatagacaagcaaatgctgagagattttgtcaccaccaggcctgccctaaaagagctcctgaaggaagcgctaaacatggaaaggaacaaccggtaccagccgctgcaaaatcatgccaaaatgtaaagaccatcgagactaggaagaaactgcatcaactaatgagcaaaatcaccagctaacatcataatgacaggatcaaattcacacataacaatattaactttaaatataaatggactaaattctgcaattaaaagacacagactggcaagttggataaagagtcaagacccatcagtgtgctgtattcaggaaacccatctcacgtgcagagacacacataggctcaaaataaaaggatggaggaagatctaccaagccaatggaaaacaaaaaaaggcaggggttgcaatcctagtctctgataaaacagactttaaaccaacaaagatcaaaagagacaaagaaggccattacataatggtaaagggatcaattcaacaagaggagctaactatcctaaatatttatgcacccaatacaggagcacccagattcataaagcaagtcctcagtgacctacaaagagacttagactcccacacattaataatgggagactttaacaccccactgtcaatattagacagatcaacgagacagaaagtcaacaaggatacccaggaattgaactcagctctgcaccaagcagacctaatagacatctacagaactctccaccccaaatcaacagaatatacatttttttcagcaccacaccacacctattccaaaattgaccacatagttggaagtaaagctctcctcagcaaatgtaaaagaacagaaattataacaaactgtctctcagaccacagtgcaatcaaactagaactcaggattaagaatctcactcaaagccgctcaactacatggaaactgaacaacctgctcctgaatgactactgggtacataacgaaatgaaggcagaaataaagatgttctttgaaaccaacgagaacaaagacaccacataccagaatctctgggacgcattcaaagcagtgtgtagagggaaatttatagcactaaatgcctacaagagaaagcaggaaagatccaaaattgacaccctaacatcacaattaaaagaactagaaaagcaagagcaaacacattcaaaagctagcagaaggcaagaaataactaaaatcagagcagaagtgaaggaaatagaaacacaaaaaacccttcaaaaaatcaatgaatccaggagctggttttttgaaaggatcaacaaaattgatagaccgctagcaagactaataaagaaaaaaagagagaagaatcaaatagacacaataaaaaatgataaaggggatatcaccaccgatcccacagaaatacaaactaccatcagagaatactacaaacacctctacgcaaataaactagaaaatctagaagaaatggatacattcctcgacacatacactctcccaagactaaaccaggaagaagttgaatctctgaatagaccaataacaggctctgaaattgtggcaataatcaatagtttaccaaccaaaaagagtccaggaccagatggattcacagccgaattctaccagaggtacaaggaggaactggtaccattccttctgaaactattccaatcaatagaaaaagagggaatcctccctaactcattttatgaggccagcatcattctgataccaaagccaggcagagacacaaccaaaaaagagaattttagaccaatatccttgatgaacattgatgcaaaaatcctcaataaaatactggcaaaccgaatccagcagcacatcaaaaagcttatccaccatgatcaagtgggcttcatccctgggatgcaaggctggttcaatatacgcaaatcaataaatgtaatccagcatataaacagagccaaagacaaaaaccacatgattatctcaatagatgcagaaaaggcctttgacaaaattcaacaacccttcatgctaaaaactctcaataaattaggtattgatgggacgtatctcaaaataataagagctatctatgacaaacccacagccaatatcatactgaatgggcaaaaactggaagcattccctttgaaaactggcacaagacagggatgccctctctcaccgctcctattcaacatagtgttggaagttctggccagggcaatcaggcaggagaaggaaataaagggtattcaattaggaaaagaggaagtcaaattgtccctgtttgcagacgacatgattgtttatctagaaaaccccatcgtctcagcccaaaatccccttaagctgataagcaacttcagcaaagtctcaggatacaaaatcaatgtacaaaaatcacaagcattcttatacaccaacaacagacaaacagagagccaaatcatgggtgaactcccattcacaattgcttcaaagagaataaaatacctaggaatccaacttacaagggatgtgaaggacctcttcaaggagaactacaaaccactgctcaaggaaataaaagaggacacaaacaaatggaagaacattccatgctcatgggtaggaagaatcaatatcgtgaaaatggccatactgcccaaggtaatttacagattcaatgccatccccatcaagctaccaatgactttcttcacagaattggaaaaaactactttaaagttcatatggaaccaaaaaagagcccgcattgccaagtcaatcctaagccaaaagaacaaagctggaggcatcacactacctgacttcaaactatactacaaggctacagtaaccaaaacagcatggtactggtaccaaaacagagatatagatcaatggaacagaacagagccctcagaaataatgccgcatatctacaactatctgatctttgacaaacctgagaaaaacaagcaatggggaaaggattccctatttaataaatggtgctgggaaaactggctagccatatgtagaaagctgaaactggatcccttccttacaccttatacaaaaatcaattcaagatggattaaagatttaaacgttaaacctaaaaccataaaaaccctagaagaaaacctaggcattaccattcaggacataggcgtgggcaaggacttcatgtccaaaacaccaaaagcaatggcaacaaaagacaaaattgacaaatgggatctaattaaactaaagagcttctgcacagcaaaagaaactaccatcagagtgaacaggcaacctacaaaatgggagaaaattttcgcatcctactcatctgacaaagggctaatatccagaatctacaatgaactcaaacaaatttacaagaaaaaaacaaacaaccccatcaaaaagtgggcgaaggacatgaacagacacttctcaaaagaagacatttatgcagccaaaaaacacatgaagaaatgctcatcatcactggccatcagagaaatgcaaatcaaaaccactatgagatatcatctcacaccagttagaatggcgatcattaaaaagtcaggaaacaacaggtgctggagaggatgcggagaaataggaacacttttacactgttggtgggactgtaaactagttcaaccattgtggaagtcagtgtggcgattcctcagggatctagaactagaaataccatttgacccagccatcccattactgggtatatacccaaatgagtataaatcatgctgctataaagacacatgcacacgtatgtttattgcggcactattcacaatagcaaagacttggaaccaacccaaatgtccaacaatgatagactggattaagaaaatgtggcacatatacaccatggaatactatgcagccataaaaaatgatgagttcatatcctttgtagggacatggatgaaattggaaaccatcattctcagtaaactatcgcaagaacaaaaaaccaaacaccgcatattctcactcataggtgggaattgaacaatgagatcacatggacacaggaaggggaatatcacactctggggactgtggtggggttgggggagggggaagggatagtattgggagatatacctaatgctagatgacacattagtgggtgcagcgcaccagcatggcacatgtatacatatgtaactaacctgcacaatgtgcacatgtaccctaaaacttaagagtataataaaaaaaataaaa

SEQ ID NO: 929 - DNA, 297 bp, Homo sapiens
  source 1..297: mol_type = other DNA
gccgggcgcggtggctcacgactgtaatcccagcaatttgggaggccgaggtgggctgatcacctgaggtcgggagttcgagatcagcctgaccaacatggaggaaccccgtctctactaaaaatataaaattagccgggcgtggtggcgcatgcctgtaatcgcagctactcggaggctaaggcaggagaatcgcctgaacccgggatgcggaggttgcggtgagccgagattgcgccattgcactccagcctgggcaacaagagtgaaactccgtctcataaaaaaaaaaaaaaa

SEQ ID NO: 930 - DNA, 2821 bp, Homo sapiens
  source 1..2821: mol_type = other DNA
tagcaagatggccaaatagtaatacctctggtctgcagctcccagtgagatcaaggcagaaggtgggtgatttctgcatttccagctgaggtacccggctcatctcactgggactcattagacagtgggtgcagcccatggaaggcaagccgaagtagagtggggcactgccttaccggggaagcagtaggggtcggggaactccttcccctagccaagggaagttatgaggaactgtgctgtgaggaacggtgcatccaggcccagatactatgcttttcccatggtcttctcaacccacagaccaggagattccctcctgtgcctatgccaccagggccctaggtttcaaacacaaaactgggcaaccgtttgggcagatatggagcttgctgcaggagttgtttttcataccccagtggtgcctggaatgccagcaagacagaaccgttcactccactggaaagggggctaaagccagggagccatgtggtctagctgagcaggtcccaccaccacggagcccagcaaactaagatccactgacttgaaattctcactgccagcacagcagtctgaagttgacctgggatgctcaagcttggtggggggaggggcgtttgtcattactgaggcttgagtaggcagttttcccctcacattatgaacaaagcctccgggaagttcaaactgggcagagcccacggccgcttggcaaacccgctgtagccagactgcctctctagattccacctctctgggaagggcatctctgaaagaaaggcagcagccccaggcaggggcttatagataaaactcccatctttctgggacagagcacctgggggaaggggcggctgtgggcacagcttcagcagacttaaatgttcctgcctgctggctctcaagagagcagcggatctcccagcacagcgctcaagctctgctaagggatagactgcctcctcaagtgggtccctgacccccatgcctcctgactgggagacaccttcaagcaggggctgacacatacctcatatacaagagctccggctggcatctggcaggtgcccctctgggacgaagcttcccagaggaaggaaaaggcagcaatctttgctgttctgcagcctctgctggtgatacccaggcaaacagggtctggagtggaactccaacaaactccagcagacctgcagcagaggggcctgactgttagaaggaaaactaacaaacagaaaggagtagtatcaacatcaacaaaaaggacatccacacagaaaccccatctgaaggtcaccaacatcaaagaccaaagggagataaatccacaaagatgaggaaaatccagcacaaaaaggctgaaaattgcaaaacccagaatgcatcttctcctccaaaggatcacaactccttgccagcaaggaaataaaactggaccgagaatgagtttgacgaactgtcagaagtaggcttcagaaggtgggtaataacaaactccttcgagctaaaggagcatgttcttacccaatgcaaggaaactaagagccttgaaaaaaggttagagaaattgctaactagaataactaatttagagaagaacataaacgaccagatagagctgaaaaacacagcacgagaacttcatgaagtatacacaagtatcaatagccaaatcgatcaagcggaagaaaggatatcagagactgaagatcaacttaatgaaataaagcatgaaaacaagattagaataaaaaggaacgaacaaagcctccaagaaatatgggactatgtgaaaagaccaaacctacatttgactggtgtacctgaaagtgacggggagaatggaaccaagttggataacacccttcaggatattatccagtagaacttccccaacctagcaagacaggccaagattcaaattcaggaaatacagagaacagcacaaagatacttcttgagaagagcaaccccaagacacataatcatcagattcaccaaggttgaaatcaaagaaaaaatgttaagggcagccagagagaaaggtcgggttacccacatagggaagcccatcagactaagagtggatctctgcagaaaccctacaagccagaagagagtgggggccaatattcaacattcttaaagaaaagaattttcaacccagaatttcatatccagccaaactaagctttataagcaaaggagaaataaaatcctttacagacaagcaaatgctgagagattttctcgccaccaggcctgccttacaagagctcctgaaggaagcactaaatatgcaaaggaaaaaccagtaccagccactgcaaaaacataccaaattgtaaagaccattgacactatgaaactgcatgaacgaatgggcaaaataaccagctagcatcataatgacaggatcaaattcacacataacaatattaaccttaaatgtaaacgggctaaatgccccaattaaaagacatagactggcaaattggatagagtcaagacccatcggtgggctatattcaggagagccatctcacatgcaaagacacacataggctcaaaaataaaaggatgaaggaatacttaccaagcaaatggaaagcaaaaaaaaaaaaaaaaaaaaaaaaaaagcaggggttgcaatcctagtctctgataaaacagactttaaaccaaaagagacaaagatcaaaagagacaaagaagggcattacataatggtaaagggatcaatgcaacaagaagaggtaactatcctaaatatatatgcacccaatacaggagcacccagatttataaagcaagttct

SEQ ID NO: 931 - DNA, 2980 bp, Homo sapiens
  source 1..2980: mol_type = other DNA
gaaaaacaagcataaaccaatcccaatgctaccataccaaaagaaataaccaaactgggttttaaaatgagtgaaattgagatgtgaaaaaaccatacagaagatcaacaaaactaaaatttagctctttgaaggaatgaataagattggtagactgctagatagactaatcaagataaaaaagagaatatatgaaaaaacacaaccggaaatgacaaagtggccattaccactgaccccacagaaatacaaaaaaaaaaaaaaaaaaaaccctcagagactattatgagcacatctatgcacacaaactggatgacctcctaagattgaaacaggaaggaattgataccctaaacagaccaataaaaagctttgaaattaatcagtaataaaaagtgtacaaaccagaaaatgccttgggccagatgaaatcacaccagatgtttaaagggatggtgccaatcctactgaaactatttcaaaaatggagaaggaaggactcctccctaactcattttatgaggccagcatcattctgataccaaaacatggcacagacagaacaaaaaaggaaaacttcaggctaatatccctaatgaacattgatgcaaaactcctcaacaaagtactagcaaaccaaatccagcagctacatcacaaagctcatccaccataatcaagtaggccttatttcagggatgcaaggttggttaaacatacacaaatcaatatatgtgattcatcacatcaatggaactaaaaacaaaaaccacatgatcatctcaatagatgcaaaaaaggctttcaataaaattcaacatcccttcatgttgaaaacctcaactaattaggcattgaaggaagatacctcaaaaaaataagagccatctctgacagacccacagccaacatcatactgaatgggcaaaagctggaaacattctccttgagaatctgaaaaagacaaggatgccaattctcaccatttccattcaaaatagtatgggaagtgctaaccagagcaataaggcaagaaaaagagaaaaaagtgcatccaaatacgaacagaagaaatcaaaccatctcttttcatagataatatgactttacacctagaaaagcccatagtctcagcccaaaagcccctacgtcttataaacaacttcaggaaggttttagcctacaaaatcagtgtacaacagcatttctacacaccaaaaacacccaagctgagagccaaataaaaaatacaatcccattcataacagcctaagaaacctgggaaaacagctaactagggatgtgaaagaaattttgtacaaagaaaattacaaaacactgctgaaagaaatcagcaacaagacaaacaaatggaaaaacattccatgctcatggataggaagaatcaatattgttaatgtggccatactgcaaagcaatttacaaatacaatgctattcctatcaaactaccaacaatatttttcacatacttagaaaaatctctttgaaaattcacatgaaaccagaaaagagctcgaacggccaaaacaatgctaagcaaaagaacacagctagaggcatcacaatacctgatttcaaagtatattacaagatgacactaaccaaaatagcatggtgctggtgcaaaaaacaaacacatagactaatggaacagaatggagaacccagaaataaaatagcacacttacaaccatctgatcttcaacaaagtggagtaaaacaagcaatgggtaaaggattccctattcaataaatggtgctgtgattgaaattggacctcttcctttcaccatacacaaaaattaactcaagatggattaagacttgaatgtaaaacctaaaactataaacaccctaaaagaaaacctaggaagtgctgttctgtacataggacatggaaaaaatttcatgacaaagattccaaaaacaataccaagaaaagcaaaaacaggcaaatgggacctaattaaactaaagagcttctgcacaacaaaataaactatcaacaaagtaaacaggcaacctacaaaatgggagaatacatttgcaaattatgcatctgacaaaggcctaatatccataatctgtaaggaacttaaattaactggcaaaacactaagaaccatgttaaaaaaatgggcagaggacatgaacagacacttctcaaaagaagacatatatgcagccaacaaacatttctaatcattagagaaatacaaatcaaaaccacgaatagatgccatctcataccactcagaatgacttttattaagaagtcaaaaaataactgttgccagcaagattgtggtgaaaaggtaatgcttatacactgctagtggaaatgtaaattagttcagccactgtggaaagcagtttggctatttctcaaagaacttaaaacagagctacctttcaactcagcaatcccattaatgggtatatacccaaaggaatataaataattctaccataaggacacacacactcgtatgttcactgaagcactattcacaatagcaaatacatggaatcaacgtagatgcccatctacagtggacttggtaaagaaaacatgatacgtatgcatgatggaatactacatagccataaaaaggaacaaggtcatgtactttgcagcaacatggatggagatggcagacattataaaaaggtaattaatgcaggaacagaataccaaataatgcatattcttttataagtgacagctaaacattggagtacacatgtacacaaagaggggaatagacaccagggcctacttgagggtggatggtgggaagagggtgaagatcgaaaaactgcttattgagtactatgtttattacctgagtgatgaaataatctgtacaccaaaccttcatgacatgcaattaacccatatatgaaacctgcacaagtactagctccacataaaataaaaggtggaaagaaaaaaa

SEQ ID NO: 932 - DNA, 6050 bp, Homo sapiens
  source 1..6050: mol_type = other DNA
gttccaggatggacaaataggaacagctccagtctgcagctcccagtgtgattgactcagaagacgggtgatttccacatttccaactgaggtacctggttcagttcattgagactggttggacagtgggtgcagcccatggagagtgagctgaagcagggtggggcgttgccttacccgggaagtgcaaggggttgtgagagttccctttcctagccaaaggaagccgtgacagactacttgaaaaaacggaacactccctgcccaaatactgcacatttcccaaggtcttagcaaccagcagacaaggtgattctctcctgtgcctggctcgatgggtcccatgcccacggagtcttgctcactgctagtgcagcagtctgagatcgatctgcgaggtggcagcctggctggggttggagcatccgccattgctgaggcttgagtaagtaaacaaagcagtccggaagcttgaactgggtggagcccaccacagctcaacaagacctattgactccagctctgtgggcagggcatagctgaacaaaaggcagcagacaacttctgcagacttaaacatccttgtctggcacgctctgaagagagcagtggttctcccacacggcatttgagttctgagaatggacagactgcctccacaagtgggtccctgacccccaagtagcctaactgagagacacctcccagtaggtgctgacagacacctcatataggcaggtccccttctgggaagaagcttccagaggaaggatcaggcagcaatatttgctgttctgcaatattatttgctgttctgcagcctctgctagtgatacctaggcaaacagggtctggagtggaactccagcaaactccaacacacttgcagctgagggacctgacagttagaaggaaaactcacaaacacaaaggaatagcatcaacatcaataaaaagttcatctataccaaaaccccaactttaggtgaccaacatcaaagaacaaaggtagataaaaccacaaagatgaggagaaaccagagcagaaaagctgaaaattctaaaaatcagagcacctcttcgccaaaggattgcagctcctcaccagcaatggaacaaagctggatggagaatgactttgacaagttgactgaagtaggcttcagaaggtcagtaataacaaatttctacgagcgaaaggagcatgttcaaacccatcacaaggaagctgaaaatgttgaaaaaagattagatgaatggctaaatagaataaacagggtagataagaccataaatgaccggatggagcagaaaaccatggcacgagaagttcgtgacgcatgcaaaagcttcaatagctgattcaatcaagtggaataaagggtatcagcgattgaaaatcaaattaatgaaataaagtgagaagacaaggttagagaaaaaagagtagaaagaaacaaacaaagcctcctagaaaatacgggactatgtgaaaagaccaaatctatgttttattggtgtacctgaaagtgatggggagaatggaatcaagttggaaaacattcttcaggatattatccaggagaacttccccaagctaacaaggcaagccaacattcaaattcaggaaatacagagaacaccacaaagatactcctcgagaagagcaaacccaagacacataattgtcaagttcaccaaggttgaaatgaaggaaaaagtgttaagggcatccagacagaaaggtcgagttacccacaaaggcgcaaagggaagcccatcagaaaaacagcggcacttggcagaaaccctacaagccagaagagagtgtgggccaatattcaacattcttaaagaaaataatcttcaaccctggattttatatccagccaaactaagcttcataagtgaaggacagatgaactcctttacagacaagcaaatgctgagagattttgtcaccaccaggcctgcctaacaagagctcctgaaggaagcactgaacatggaaagaaacgaccagtaccagccactgcaaaagcatgccaaattgtaaagaacatcagtgctatgaagaaactgcatcaattaaggggcaaaataaccagtgaatataataatggcaggatcaaattcacacacaaacttaaatataaatgggctaaatgcctcaattaaaagacacagactggaaaattgggtaaagagtcaaaacccatcagtgtgctatattcaggagacccatctcacatgcagagacacacatgggctcaaaataaagggatggaggaagatctaccaagcaaatggaaagcaaaaaaaaagcaggggttgcaattctagtctctgataaaaaagactttaagccaacaaaggtcaaaagagacaaagaaggccattacataatggtaaagggatcaattgaacaagaagagctaactgtcttaaatatatatgcacccaatacaggagcacccagattcataaagcaagtccttagagacctacaaagagacttagactccctcacaataataatgagagactttaacaccccactgtcaatatttcacagaccaatgagacagaagtttaacaaggatagccatgcctgaactcagctctccaacatgcagacctaatagacatctacagaattctccaccccaaatcaacagaatatacattctcagcaccacattgcacttattctaaaattgaccaaataattggaagtaaagcactttcagcaaatgtaaaagaaatcacaacaaactgtcactcagaccacagtgcaatcaaattagaactcagaattaagaaactcagtcaaaaccgcgcaactacatgtaaactgaacaacttgctcttgaaggaatactgggtaaataatgaaacgaaggcagaaataaagatgttctttgcaactaatgagaaaaaagaaacaatgtaccagaatctctgggacacatttaaagcagtgtgtagagggaaatttatagcatgaaatgcccacaaaagaaagcaggaaagatctgaaatcgaccccctaacatcacaattaaaagaactagagaagcaagagcaaacaaattcaaaagctagcaagaggcaagaaataactaagatcagaacagaactgaaggacatagagacaaaaaaacccttcaaaaaatcaatgaatccaggagctggtttttggaaaagattaacaaaattgatagaccactatcaagactaattaagaagaaaagagagaagaaccaaataaacgcaataaaaatgataatggggatatcaccaccaatcccacagatatacaaactaccatcaaagaatactataaacacctctatgcaaataaactggaaaatctagaagaaatggataaatttctggacagatacatcctccagagactgaaccaggaagaagttgagtccctgaatagaccaataacagtctctgaaattgaggcaataattaataacctaccaacaaaaaaagtccaggaccagaaggattcacagccgaattctaccagaggtacaaagaggagctggtatcattccttctgaaactattccaatcaagagaaaaagagggcatcctccctaaatcattttatgaggccaacatcatcctgataccttagcctggcagagacacaataaaaaaagataattttagaccaatatccctgatgaacattgatgcgaaaatcctcaataaaatactggcaaaatgaatccagcagcaaatcaaaaagcttatccaccatgatcttgtcggcttcatccctgggatgcaaggcttgttcaacatatgcaaatcaataaacgtaatccatcacataaacagaacgaatgataaaaaccacatgattatctcaatagatgcaggaaaggccttcgacaaaattcaacagcacttcatgttaaaaactctcaataaactagatatttatggaacatacctcaaaataacaagagctatttatgacaaacccacagccaaccaatatcatactgaatgggcaaaagctggaagcattccctttgaaaactggcacaagacatggacgccctctctcaccactcctactcaacatagtgttagaagttctggccatggcaatcaggcaagagaaagaaataaagggtattcaattaggaaaagaggaagtcaaattgtccctgtttgcagatgacatgattgtacatgtagaaaaccccatcatctcagcccaacatctccttaagctgataagtaacttcagcaaagtcccaggatacaaaatcaatgtgcaaaaatcacaagcattcctatacaccaataacaggcaaacagagaggcaaatcatgagtgaactcccattcacaactgatacaaagagaataaaatacctaggaatccaacttacaagggatgagaaggacctctttaaggagaactgcaaactactgttcaatgaaataaaagaggacacaaacaaatggaagaacattccatgctcatggaaaggaagaatcagtattgtgaaaatggccacactgcccaaggtaatttatagattcaatgccatccccatcaagctaccaatgacttttttcacagaattggaaaaaactactttaaagttcatatggaatcaaaaaagagcccgcatagccaaggcatcatgctacctgacttaaactatcctacaaggctatagtaaccaaaacagtgtgatactggtaccaaaatagatatagaccagtggaacagaaaagaggcctgagaaatagcaccacacatctacaaccatctgatctttgacaaacctggcaaaaacaagaaatagggaaaggattccctatttcataaatgatgccaggaaaactggctagccatatgtagaaaactgaaactggatccgttccttacaccttatacaaaaattaattcaagatggattaaagatttaaatgttagacctaaaaccataaaaaccctagaagaaaacctaggcaatacctttcaggacatacacatgggtaatggcaacaaaagccaaaatagacaaatggaaagagcttgtgcatggcaaaagaaactaccatcagagtgaacaggcaatctatagaatgtgaaaaaatttttgcaatctacccatctgacaaagggctaatatccagaatctacaaagaactttaacaaatgtacaagaaaagaaacaaacaaccccatcaaaaagtgggcaaaggatacgaacagacacttctcaaaagaagatatttatgcagccaacagacacatgaaaaaatgctcatcatcactggtcatcagagaaatgcaaatgaaaaccgcaatgagataccacctcatgccagttagaatggcaatcattaaaaaatcaggaaacaagagatgctggagaggatgtggagaaataggaaagcttttacactgttggtgggagtgtaaattagttcaaccattgtggaagacagcgtggtgattcctcaaggatctagaactagaaataccattagacccaacaatcccattactgggtatatacccaaaggattataaatcattctaataaaaagacacatgcacacatatgtttattgtggcactattcacaatagcaaagacttgaaaccaacccaaatgtccaccaatgataaactagattaagaaaatgtggcttatatacacagcggaatactatgtagccataaaaaggatgagttcatgttttttgcagggacgtggatgaagctgggaatcatcattctaagcaaactatcacaaggatggaaaacaaaacactgcatgttttcactcataggtgggaagtgaataatgagatcacttgtacacagggtggggagcatcacacaccagtgcttgtcatggggtgggggtctgggggagggatagcattaggagaaatacctaatgtaaatgatgagttgatgggtgcagcaaaccaacatgggacatgtataactatgtatcaaacctgcacgttgtgcacatgtaccctagaacttaaa

SEQ ID NO: 933 - DNA, 3810 bp, Homo sapiens
  source 1..3810: mol_type = other DNA
ccttcagttcatctcctaatccacccccaatgtttggctcaagctccagaagcttgacgacggccgtcaaaccccacaacaagtccttcttaatttagccttcaaagtcttcaacaattgtaatgaggaaagtaaaaggcaaaaacaggcagagtttcaaatgcttgcctccaccatcaggggccctgcaggcccacggggccgcagctccacacagaagcctcctaaaaatccacctccacctggcgcctatttcaagtgtggcaatgaaggccactggtccagacaatgcccaaacccaggtaaagccagcagtccatgcccctctctgcggagaaccccactggaagtcggactgtaagcagctcccacaaggactgcccccatcccttcctgagctagccaaaacctcctacttatatctcatcggccttgccactgaagaatgatggtgccctggaacagacaccctggcaactacctttgcctcatccaagccaagggtaaccctgatggtggcaggtaggccagtatatttttaaattaataccaggcaacctactctgctttacctaatttttcaggaaccacccagtcctcccaggtgtctgttgtaggaattaatggacaagtctccaaacctcgagtcccccctccacttttctgctcccttcacaccttttccttcactcactctttcttagtcctgccctcatgcccaactactctcctaggcagaaatatctttccaaaactccacactactttccacttccacattccccatagtacccaacacatcaacccagacccctctggggcttctaactttcttctactcctccaaccacccaccttaaaacgtgcaactttttcttgtcccccatctgtagttaaccccgctgtttaggatacttccacaccctcagtcgcaggacaccacacccctgtccacaatacccttaaatagcccacccagttcctatcacagaagtagtatgccatcccccaagtagctctcataagcctaaagcctatcatttctcgtctcctctccagtcacctactctgcccaacaaactccccttttaacacaccagttctacctgtgaaaaagctagatggagcttatcacttagtctaggacctcaggctcattaaccaagctgtactcccagtatgtccagtagttccttacccatatactttactttccacaattccctccgataccactcatttttctgttctaaacctaaaggatgcttttttttcataattcctttacactctgattcccaaaacctcttttcctttatgtggaatacccccgacacccacctttcatgtgagctcacctggtgcatactacctcaaggtttcagagacagcccccacttttctgtgtccaaaaggcccttgctcatgacctctgtagcttatccctaaagctgtccactctctttcaatgtattaatgatctgctcctgtgtagcccctctcaaaaaaactgcaactaccatactatctctcttttaaacttcttcccaaaatgcgagtattaggtctcccctaaagaaacaaaaatatgcacccccctcagtcacctatctatgcctaactcttaccccatgaacctgagagctcacaaccgaccacatatccctcctccagtccctcctgcctccgcaaactaagcaaaaaaatctctcttttctaggactagtgggatattgtaggctctgggttccctccttcgctctatctgccaaaccattataccaggctgctaaaggccctctctatgtgccattaaactctgcacagcctattacccaacctttccatctactccagaaggctctcacctcagcctcatcctcactctcccagacctcaccaaacctttctccctctatatcgacagatgatgtaaagttgcattatgtattctaacccagtctaagggacctaccgcccaggttgttgcctacctctctaaacagcttaaagccaccattctccgatggcctgcctgccttcaagcattggtggcagctgctgtcctcacccttgaaagcctaaaactatctctccatgccaacctaacagtttattcaacccataacatcaaaaacatgttagctcactgcagtgtactaagtctcatctctgccccatggctcctccaactgtatgctctattcatagaaaaccccctcctaccaatcaccatactaaccagctcccgtctaaacacagccatgctcttacctgaagttacaaccgcccaagaccctacacacttctgtgtaaacactgttcaaaccttccttataccttttccaaacctaacagaacaaccctttccagatgccccctttacttagtttgtagatggcagctccttcctacatcaaggacgctggcatgctggctatgctatagtgtcaccccacacacacacactattgaagccaatctgctcttgctaagcaccacctctaaaaaagctgaactcgtcgctcttcctcaagctctcactctagcagccagacaacaaatcaacatatattcaaattctcgttatacattctacatagtgtactcacactcgtccatctggaaaaaacgaggcttcctaattgcaaaaaacactcctgccataaatggctctctcatcagcaaactccttcaagctgccaggcttctacagaaagttgccatcatttattgcaggggccaccaaaccccggatgatcctatatcagctggaaataggctagcagatcagataaccaaacaagtagccctccaacccatgcaaggccagtttctgtccctgtcctttttctctcctctttactcctcagaagaaaaggaggacttccaagcccaaaaccttcaaaagcaaggaccatggtatgtcaaggaaaggtgctttattcttcctcactctcaaagccttcctcacctccaaagcctccacaaccctttccatatcagttacaacctctcttgcaacttctctgccctattctcacttgccctcacctttccagccatgtttgagaaattacctagtcctgctctgtctgccactcagtgtcaccccaaggctccttccagccaccttttcctacccaccaagcccagggccaggtacccaggcaaaattaacaaatggacttcactcacatgctggccaataaacggctccactatcttctagtctttatctgtactttctccaggtagataaaagcattcccaacaacttcagaaggtataaatgtcatcacacaaactctcttcatgcatataattctccgttttggacttccaacattcatccagtccaacaacggaccctccttcatcagccaaattatccaaggcatctctacatccttaggtataaaatgggttctccacacaccctataggcctcaattctcaggcaaagttgaaaaaattacgtctgtccttaaagcccaactcaccaagctggctctaaaaactcaccagtcgtaaacaaaaaatctccctttcacccttataagactccacacaacaccaaaagcaccctctttttatagtccctttgaaatcatatatggccaaacttttgtcttggggtctccacccttaccagactctgagccactcagatattacctctcctccttaatccagacatggtctttcattcgtgaagcagcaaataaggccatgcctctccctgttaacacctttttgtcctctgaacgtaactgtcttacaggcacagacgtgtttccagacaatcca

SEQ ID NO: 934 - DNA, 2005 bp, Homo sapiens
  source 1..2005: mol_type = other DNA
ccacatgataatctaaagggcagaaaaagctttcaataaaatctaacaccccttcatgttaaaagttctcaataaactaggtattgaaggagcatacctcaaaataataagagccatctgataaagccacaaccaacatcatactgaatgcgccaaagctggaagcattcccttttaaaaccgacacaagacaagaatgccctctctcaccactcatattcaacatagtattagaagtcctggccagagcaatcagaccagagaaagaaatagagggcaaccaagcaagaggagaggaagtcaaactatccttgtttgcagatgacatgatcctatatctagaaaatccaatagtctcggcccaaaagctccttaatctgataaataacttcagcaaagtctcagtgtacaaaaatcaacatacaaaagtcactagcattcgtatacaccaacaacagtcaagccaagagccaaatcaggaaggcaatcccattcagaactgccacaaaagaataaatatctaggaatactgttaactagggaagcgaaagatctctacaagaagaactacaaatcactgctcaaagaaatcagatatgacacaaacaaatggagaaacagtccatgctcatgaataggaagaatcaatattgttaaaatggtgatactgcccaaagcaattcatagaatagactcaatgctattcctatcaaactaccaatgacattcttcacagaactaggaaaaactattttaaaattcatatggaaacaaaaaaacagcctgaataaccatggcaatcctaagcaaaaagaacaaagctggaggcatcatgctacccaacttcaaatgatactagagggctccagtaaccaaaacagcattgtactggtacaaaaacagacacagagaccaatggagcagaatagagagcccagaaataaggccacacacctacaaccatctgatctttgacaaagtcgacaaaaacaagcaatggaaaaaggactcccaattcaataaacagtgctgggataactggttagccatatgtagaagattgaaactggaccccatccttatctcacatataaaaatcaactctatatgtattaaagacttaaatgtaaaagtaatgtaaaactcaaaattataaaaaccctcaaagaaaacctacgtaataccattctgaacataggaatggacaaagatttcataacaaagacgccaaaagcaattgcaacaaaagcaaaaattgacaaatgagatctaactaaactaaagagcttctgcacagcaaaagaaactatcgagttaacaggcaacctacggaaccagagaaaatatttgcaaactatgcaacttacaaaggtctaatatccagcatctataaggaactttaacaaatttacaagaaaaaaaacaaccccattaaaatgtgagcaaaggatatgaagagacacttttcaaaagaagacatacatgtggccaagaagcatatataaaaaatttacatcattagagaaatgcaaatcaaaaccacaatgagataccatctcacacaagtcagaatagctattattaaaaaatcaaaaaaaaataataacagatgctagtgagattgcaaagaaaagggaacctttatacactgttggtgggagtgtaaattagttcaaccatggtagaaaacagtgtggcaatttctcaaagacctgaaaacaaaactaccattcaacccagcaatatcattatggggtatatatccaaaggaatataaatcattctatcataaaaatacataaacgcgcatgtgcattgaagcactattcacaatagcaatgacatggaatcaacctaaatgccagtcaatggtagactggataaagaaaatgtatgttagtatgcagccataaaaaacaacaagatcatgtcctttgcaggaacatgaatggagtggaggtcattatccttagcaaactaatgcaggaacagaaaatcaaatgcc

SEQ ID NO: 935 - DNA, 6131 bp, Homo sapiens
  source 1..6131: mol_type = other DNA
aagatggccgaataggaacagctccagtctacagctcccagcatgagcgatgcagaagatgggtgatttctgcatttccaactaaggtaccaggttcatctcactgtggcttgtcggacactgggtgcaggaaagtgggtgcagtgccccgagcatgagccgaagcagggcgaggcattgcctcacccacgaagtgcaaggggtcagggaattccctttcctagccaagcaaagctgtgacagacagcacctggaaaatcgggtcactcccaccctaatactgtgcttttccaatggtcttaggaaacggaacaccaggagattatatcctacacctggctcagagggtcccatgcccacagagcctcactcattcctagcacagcagtctgagatcgaactgcaaggcggcagtgaggctgggggaggggcacccaccattgctgaggcttgagtaggtaaacaaagtggctgggaagctcgaactgggtggagcccaccgcagctcaaggaggcctgcctgcctctgtagactccacctctgggggcagggcatagccgaacaaaaggcagcagaaacgtctgaagacttaaaatgtccctgtctgacagctatgaagagagtggtggttctcccagcacagagtttgaaatctgaaaatggacagactgactcctcaagtaggtccctgagcccggagtagcctaactgggaggcacccccccagtaggggcagactgacacctcacacggccaggtacccctctgagatgaaacttccagaggaatgatcaggcagcaacatttgctgttcagcaatattcgctgttctgcagcctctgctgctgatatccaggcaaacagggtctggagtggacctccggcaaactccaacagacctgcagctgagtgtcctgactgttagaaggaaaactaacaaacagaaaggacatgcacaccaaaaccccatctgtacgtcaccatcatcaaagaccaaaggtagataaaaccacaaagatggggaaataacagagcagaaaaactgaaaattctaaaaatcagagcacctctcctcctcgaaaggaatgcacctcctcaccagcagtggaacaaagctggagggagaatgaccttgacgaatagagagaagaaggcttcagaaaatcaaacttctctgagatacaggaggaagttcgaacccatcacgaaaaagttaaaaaccttgaaaaaagattagatgaatggctaactagaataaccagtgtagagaagtccttaaaggacctgatggagctgaaaaccatggcacgagaactacgtgacgaatgcacaagcttcagtaaccgatttcatcaactggaagaaagggtatcagggattgaagatcaaatgaatgaaatgaaatgagaaatttagagaaaaaagaataaaaagaaatgaagaaagcctccaagaaatataggactatgtgaaaagaccaaatctacgtctgattggtgtacctgaaagtgacggggagaatggaaccaagttggaaaacactctgcaggatattatccaggagaacttccccaacctaggaaggcaggccaacattcaaattcaggaaatacagagaatgccacaaagatactcctcaagaagagcaactccaagacacataattgtcagactcaccaaagttgaaatgaaggaaaaagtcttagggcagccagagagaaaggtcgggttacccacaaagggaagcccatcagactaacagtggatctctcggcagaaactctacaagccaaaagagagtggaggtcaatattcaacattcttaaagaaaagaattttcaacccagaatttcatatccagccaaactaagcttcataagtgaaggagaaataaaatcctttacagacaagcaaatgcttagagattttgtcaccaccaggcctgccctaaaagagctcctgaaggaagcactaaacatggaaaggaacaaccggtaccagccactgcaaaaacaagccgaattgtaaagaccatcgaggctaggaagaaactgcatcaactaacgagcaaaataaccagttaacatcataatgacagtatccaattcacacataataatattaaccttaaatgaaaatgggctaaatgctcccaattaaaaggcacagactggcaaattggataaacagtcaagacccatcagtgtgctgtattcagaaaacccatctcaagtgcagagacacacataggctcaaaataaagggatggaggaaaatctaccaagcaaatggaaaacaaaaaaaggcaggggttgcaatcctagtctctgataaaacagactttaaatcaacaaagatcaaaagagacaaagaaggccattacataatggtaaagggatcaattcaacaagaagagctaactatcctaaatatatatgcacccaataccggagcacccagattcatgaagcaagtccttagagacctacaaagagacttagactcccacacaataataatgggagactttaacaccccactgtcaacattagacagatcaacgagacagaaagttaaaaaggatatccaggaattgaactcagctctgcaccaagcggacctaatagacatctacagaactctccaccccaaatcaacagaatatacattcttctcagcaccacatcacaccttcctaaatcgaccacataattggaagtaaagcactcctcagcaaatgtaaaacaacagaaattataacaaactgtctctcagaccacagtgcaatcaaattagaactcaggattaagaaacttactcaaatctgttcaactacatggaaactgaacaacctgctcctgaatgactactgggtacacaacaaaatgaaggcagaaataaagatgttctttgaaaccaaggagaacaaagacacaacataccagaatctctgggacacattgaaagcagtgtgtagagggaaatttatagcactaaatgcccacgagagaaggcaggaaagatctaaaattgacaccctaacatcacaaataaaagaactagagaagcaagagcaaacacattcaaaagctagcagaaggcaagaaataactaagatcagagcagaactgaaggagatagagacacaaaaaacccttcaaaaaatcaatgaatccaggacgtggttttttgaaaagatcaacaaaatggatagaccactagcaaaagtaataaagaagaaaagaaaagagagaagaatcaaatagatgcaataaaaaatgataaaggggatatcaccaccgatcccacagaaatacaaactgccatcagagaatactataaacacctctacacaaataaactagaaaatctagaagaaatggataaattcctcaacacatataccctcccaagactaaaccaggaagaagttgaatctctgaatacaccaataacaggctctgaaattgaggcaataattaatagctgaccaaccaaaaaaagtccaggaccagatggattcacagccgaattctaccagaggtacaaggcggagcttgtaccattccctctgaaattattccaatcaatagaaaaagagggaatcctccttaactcattttatgaggccggcatcatcctgatgccaaagcctggcagagacacaacaaaaaaagagaattttagaccaatatccctgatgaacatcgatgcaaaaatcctcaataaaatattggcaaacggaatccagcagcacatcaaaaagcttatccaccataatcaagtgggcttcatccctgggatgcaaggctggttcaacatacgcaaatcagtaaacgtaatccagcatataaacagaaccaacgacaaaaaccatatgattatctcaatagatgcagaaaaggcctttgacaaaattcaacaacgcttcatgctaaaaactctcaataaattaggtattgatgggatgtatctcaaaataataagagctatttatgacaaacccacaggaaatatcatactgaatgggcaaaaactggaagcattccctttgaaaactggcacaagacagggatgccctctctcaccactcctattcaacatagtgttggaagttctggccagggcaatcaggcaggagaaagaaataaagggtattctattaggaaaagaggaagtcaaattgtccctgtttgcagatgacatgattgtatatctagaaaaccccattgtctcagcccaaaatctcctcaagctgataagcatcttcagcaaagtctcaggatacaaaatcaatgtgcaaaaatcacaagcattcttatacaccaataacagagacagagccaaatcatgagtgaactcccattcacaattgcttcaaagagaataaaatacctaggaatccaacttacaagggatgtgaaggacctcttcaagaagaactacaaaccactgctcagcaaaagaaaagaggatacaaacaaatggaagaacatttcatgcaaatggatgggaagaatcaatatcctgaaaatggccatactgcccaaggtaatttatagattcaatgccatccccatcaagctaccaatgactttcttcacagaattggaaaaaactactttaacgttcatatggaaccaaaaaagggcccacattgccaagtcaatcctaagccaaaagaacaaagctggaggcatcacgctacctgacttcaaactatactacaaggccacagtaaccaaaacagcatggtactggtaccaaaacagagatatagaccaatggaacagattggagccctcagaaataataccacacatctacaaccatctgatctttgacaaacctgacaaaaaacgagcaatggggaaaggattccctatttaataaatggtgctgggaaaactggctagccatatgtagaaagctgaaactggatgccttccttacaccttatacaaaaattaattcaagatggattaaagacttaaatgttagacctaaagccataaaaaccctagaagaaatcctaggaaataccatgcaggacataggcatgggcaatgacttcatgtctaaaacaccaaaagcaatggcaacaaaagccaaaattgacagatgggatctaattaaactaaagagctcctgcacagcaaaggaaactaccatcagagtgaacaggcaacctacagaatgggagaaaatttttgcaatctactcatctgacaaagggctaatacccagaatctacaaagaactcaaaccaatttacaagaaaaaaacaaccccatcaaaaagtggcaaaggatatgaacagacacttctctaaagaagacttttatgcagccaacagacatatgaaaaaatgctcatcatcactggccatcagagaaatgcaaatcaaaaccacaatgggataccatctcacaccagttagaatggcaatcattaaaaagtcaggaaacaacaggtgctggagaggatgtggagaaataggaacacttttacactgttggtgggactgtaaactagttcaaccattgtggaagacagtgtggcaattcctcagggatctagaactagaaataccatttgacccagcaatcccattactgggtatgtacccaaaggattataaatcatgctgctataaagacacatgcacacgtatgtttattgtggcactattcacaatagcaaagacttggaaccaatccaaatgtccatcagtgatagactggattaagaaaatgtggcacatatacaccatggaatactatgcagccataaaaaaggatgagttcatgtcctttgtagggacatggatgaagctggaaaccattactctcagcaaactatcacaaggacaaaaaaacaaacactgcatgttctcactcataggtgggaattgaacaatgagaacacatggacacaggaaggggaacatcacacactggggcctgttgtggggtggggggagggggagagatagcattaggagatatacctaatgtaaatgacgagttaatgggtgcagcacaccaacatggcacatgtatacatatgtaacaaacctgcatgttgtgcacatgtaccctagaacttaaagtataacaataaagaaaaa

SEQ ID NO: 936 - DNA, 6368 bp, Homo sapiens
  source 1..6368: mol_type = other DNA
ggtggcaggcaagatggctgaataataacagctgtggtctgaagatcccagcgagctcatcacagaaggaaggtgatttctgcatttccaactgaggtacccagctcatctcatcggaattggttagacagtgggtgcagctcacgaagggccagctgagcagggtggagtgttgcctcacccaggaaacgcaaggggtcaaggaactcccttccctagccaagggaagctgtgagggactgtgccatgaaaaatggtgcagtccagcccagatactatgcttttcccacgctctttgcaacccacagatcaggagattccctcaggtgcctatgctaccagggccctgggcttcaagcacaaaatttggtggctgtttgggcagacaccgagatagctgcagtttcttttcataccccagtggcgcctggaacaccagcgagacagaactgttgactccccctagaaagggggctgaagccagggagccaagtggtgtagctcagtggatcccaccccagcttcgtgggggtagaggcgtctgctgatactgaggcttggttaggcagttttccgctgtcagtgtaaacaaagctgccaggaagttcgaactgggcagagcccaccacagctcggcaaaaactgtagccagactgcctctctagattcctcctctctgagcagggcatctctgaaagaaaggcagcagccccagtcaggggtttatagaaaaaactcccaactccctgggacagagcaccaggggaaaggggcatctgtgggtgcagcttcagcagacttaaacgttcccacctaccagctctgaaaatagcagaaaatctcccagcacagtgctcgagctctgctaagggaaagatggcctcctcaagtgggtccctgacccctgtgcctcctgactaggagacacctcccagcaggggttaacagacacctcatacaagagagctccagctggcatctggcaggtgcccctctgggatgaagcttccaaaggaagaaacaggcagcaatctttgtggttctgcagcttccactggtgatacccaggcaaatagggtctggagtggacctccagcaaactgcagcagacctgcagctgagtggcatgactgttagaaggaaaactaacaaacagaaaggaatagcatcaacatcaacaaaaaggacttccatacaaaaaccccatccgaaggtcaccaacatcaaagaccaaaggtagataaatccatgatgatgaggaaaaaccagtgcaaaaggctgaaaattccaaaaaccagaacacctcttctcctccaaaggatcacaactcctcgccagcaagggaacaaaactggatggagaatgagtttaacaaactgacagaagtaggcttcagaacgtgggtaataaactcctctaagctaaaggagcatgttctaacacaatgcaattaaactaagaactttgagaaaaggttagaggaattgctaactagaataaccagtttagagaagaacataaatgacctgatggagctaaaaaaacacagcacgaaaacttcatgaagcatacacaggtgtcaatagatgaattgattgtagagtttctgcagacagattctgtttcaagcagtagaaaggatatcagagattgaaggtcaacttaatgaaataaagtgagaagacaagattagagaaaaaaagaatgaaaaggcacgaacaaagcctccaagaaatatgggactatgtgaaaagcccaaatctatgattgattggggtccctaaaagtgacgtggagaatggaaccaatttggaaaacactcttcaggatattatccaggagaattcccccaacctagcaagacagaccaacattcaaattggggaaatacacaggacaccgcaaagatactctttgagaagggcaactccaagacacataattgtcagattcagcaaggttgaaatgaaggaaaaaatgttaagggcagccagagagaaagtttgacttacccacaaagggaagcccatcagactaacagcaaatctctctgcagaaactctacaagctagaagagagtgggggccaatattcaacattctgtaaaaaaagaattttcaactcagaatttcatatccagccaaactaagcttcataagtgaagaaataaaatcatttagagaagcaaattctgagattttgtcaccaccaggactgccttacaagaactcctgaaaaaagcactacacataaaaaggaacaacgggtaccagccactgcaaaaacataccaaattctaaaggccatcgacactatgaagaaactgcgtcaactaatgtgcaaaataaccagctagcatcataatgagaggatcaaattcacacacaataataaccttaaatataaacaggctaaataccccaattaaaagacacagactggcaaattggataaacagtcaagacccatcggtgtgctgtattcaggagacccatctcatgcaaagatgcacataggctcaaaataaagggatggaggaatatttaccaagcaaatggaaagcaaaaaaaaaaaaaaaaggcaggggttgcaatcccagtccctgataaaaaagactttaagccaacaaagatcaaaaaagacaaaaaagggcattacataatggtaaagggatcaatgcagcaggaagaggtaactcctaaatatatatgcactcaatacaggagcacccagattcataaagcaaattcctagagacctacaaagagacttagattcccacacaatagtgagagactttcacaccccactgtcaatattagacagatcaacgagacagaaaattaacaagaatattcaggacttgaactcagctctggaccaagcagaactgatagacatctacagaaccctcaaccaaaaatcaacagaatatacatttttctcagcaccacatggcacttattctaaaattgaccacataactggaagtaaaacactcctcagcaaatacaaaagaatgcaaatcataacagtctctcagaccacagtgcaatcaaattagaactcaggattaagaaactcactcaaaaccacaaaactacatggaaactgaacaaactgctcctgaatgactactgggtgagtaatgaaattaaggcagaaaaataaagatattcttagaaaccaatgagaacaaagacacaacgtaccagaatctctgggacacagctaaagcagtgttaagagggaaatttatagcactaaatgccaacaagagaaagcaggaaagatctaaaattgacaccctaaaattacaatttaaaaaactagagaagcaagagcaaacaaattcaacagctaccagaagacaagaaataactaaaatcagagcagaactgaaggagatagagacaggaaaaaacttcaaaaaaatcagtgaatccaggagctgttgttttgaaaagatcaacaaaataaatagactgctagccaaactaataaacaagataagagagaagaatcaaatagatgcaataaaaagtgataaaatgatatcaccgctgatcccacaggaatacaagttactatcagataatactataaacacctctatgcaaataaactagaaaatccagtagaaatggataaattcctggacacatgcaccctcccaagtctaaaccaggaagaagtcgaatccctgaatagaccaataacaagttttgaaattcaggcagtaatagcctaccaaccataaaaagtccaggaacagacggattcacagccgaattctaccagaggtacaaagagaagctggtgccattccttctgaaactattccaaacaatagaaaaagagagactcctccctaactcattttatgaggccagcatcttcctgataccaaaacctggcagagacacaacaaaaaaagaaaatttcaggccaatatccctgatgaacatcaatgcgaaaatcctcaataaaatactggcaaaccgaatacagcagcacatcaaaaagcttatctaccatgatcaagtcagctttatccctgggatgcaagtctggttcaacataggcaaatcaataagcataatgcatcacataaacagaagcaatgacaaagaccacatgattacctcaatagatgcagaaaaggccttcaacaaaattcaacaccgcttcatgctaaaaactctcaataaattaggtattggtggaccctatctcaaaataataagagctatttatgacaaaccaacagccaatatcttactgaatgagcaaaaactggaagcataccctttgaaaaccagcacaagaaaaggatgccctctctcacaactccaattcaacatagtactggaagttctggccagggaaataaggcaagagaaagaaataaatgatattcaaataggaagaaaggacgtcacattctctctgcagatgacatgactgtatatttagaaaaccccattgtatcagcccaaaatctccttaagctgataagcaacttcagcgaagtctcaggatacataatcaatgtgcaaaaatcacaatcattcctacaaaccaataacagacaagcagagagccaaatcatgagtgaactcccattcacagttgctacaaaaagaataacatacctaggaatacaacttaccagggaggtgaaggacatcttcaaagagaactacaaaccactgctcaaggaaataagagaggacacaaataaatggaaaaacattccatgctcctggataagaagaatcaatattgtgaaaatggccatactgaccaaagtaatttatagattcaatgttatccccatcaagctaccatgtactttcttcacagaattagaaaaaattactttaaatttcatatggcagcagaaaagagcccatatagccaagacaatcctaaaaaaaaagaataaagctggagacatcacacttcctgactttaaactatactgcaagtctacagtaaccaaaacagcatggtactggtaccaaaacagagatatagaccaatggaacagaaaagaggcctcagaaataaccacacatctacaaccatctgatctttgacaaacttgacaaaaacaagcaatggggaaaggattccatatttcataaatggtgttgggaaagctggctagccatatgcagaaaactgaaactggaccctttccttacaccttatacaaaaattaactcaatatggattaaagactgaaacggaagacctaaaaccctaaaatccctagaagaaaacctaggcaataccattcaggacataggcatgggcaaagacttcaggactaaagcaacaaaagccaaaattgacaaataggatctaattaaactaaagagcttctgcacagcaaaagaaactatcatcagagtgaacaggcaacccacagaatgggagaaaatttttgcaatctatccatctgacaaagggctaatatccaggatccacaaagaacttaaacaaatttacaagaaaaaaaggaacaagcccatcaaaaagtgggcaaaggatatgaacaggcacttctcaaaagaagacatttacacagccaacaaacatgaaaaaaagctcatcatcacttgtcattagggaaatgcaaatcaaaaccacaatgagataccttctcacgccagttagaatggcgatcattaaaaagtcgggaaacaacagatgctggagaggctgtggagaaataggaacacttttacactgttggtgggagtgtaaattagttcaaccattatggaagatagtgtggtgattcctcaaggatctagaattagaaataccatttgaccaagcaatcccattactgagtatatacccaaaggattgtaagtcattctactataaagacacatgcacacatatgttcattgtggcactattcacaatagcaaagacttggagccaacccaaatgcccatcaatgatagattggataaaaaaattgttgcacatatctaccatggaatactatgcagccataaaaaaggatgaattcatgtcctttgcagggacatggatgaggctagaaaccatcattcttagcaaactaacaagaacagaaaaccaaacactgcatgttctcactcataaatgggagttgaacaatgagaacacatggacacagggagtggaacatcacacactggggcctgttggggaggtggggcactagaggtgggatagcattaagagaaatacctaatgtagatgacaagttgataggtgcagcaaaccaccatggcacatgtatacctatgtaacaaacctgcacattctgcacatgcaccccagaacttacagtattaaaaaaa

SEQ ID NO: 937 - DNA, 4386 bp, Homo sapiens
  source 1..4386: mol_type = other DNA
gtgtgctgctgtcatggaaaggaacggaaaaagtgagtaaatacagcacctttaactgaaatatccaggtacatgcattggaactaatcaaggaaataactcaactcacgaagaacagagaaatgtaaggcaggccaattccccacctgggagtgacacagagccaggagaacctcccctgcctagggaagcagtgagtgattgagaaaccctgggaacccacgcttctttgcaacttctagttcaggagattccctaatgaacccactctgccagggccttcagtcatagctatgtggaatcttggcagagcagccactcaggcacatgcagagccccaagaaccttagatacccatgcttcccagcaaaagcaacttaactctggcatagacccccatacatatatacccttagaaaaggggttgaatccagggggctgagcagagattttctgcaggtcctgttttcatggcacctcacaggataaaacccattggcttggaaccccagccagccaccaccctgagttcacaaagggcactatcatggctgggccaaaatgattgctgatgataagccagacgcaatggtatgcgggacctaccatcactgttaggtgggaccaggcactgtatctctgtagggccatcacccggaatatttcagtccactatgtgcatttttctgagccagacagatttgcgccggttttacacctccctgagacacatctcccagggggaggagtgggaaaccatctttgctgcttcacagccttagcgagtgccctagggctctagggagtctgagtcaaatagggactggagcgatcctctggcacagccaagaggctaaatagagaagcagtcagactgcttattcacgtaggtctcaaatcctgtttctctccactgggaaaaatccgtgattggggtctccagtcacccctgctggtgttatgtggccatcagcggttttaaacctccctggaatggagctcccagaaggaggaataggctgccatctcttctgtttggccaccttagccattcttgccttcgggctttggagcatctgagacaactgggggctagagcagacccccagcacagcacagctaccctatgaaaatgtggccagactgcttcttaaaagcaggtctcaaatcccattcatcctcaatgggtgggacctcccaaccaggattatagctaccctggagatgttttccagccagcagcagttcaaacttccctgggatagagcccccagagggaggggaaggccaccatctttgctgtttggcagccttagctgttcttgcctctgagctttgaaaagtccaaggtcactggtcactgggagctaatgcagacccctagcacagcacatctgctgtatgaaaatgtgaccagattgctttttaaagtgggtccccgatcctattcctcttcactgggggggacctcccaaccacagtatccagctgctctcaccagtgttttccagccaacagcagttccaaaccttcctgggaagaagctcccagagaaaagtttgggccaccaactttgctgtttggcagccttagctgttcttgcctgtgggccttggagagtccgaggtgactaagggattgagtggattcctaccacagaacagctgctttatgaaaaaatggccagactgcttttttaagtgggtccctgatcctgttactcttcactgggtgatatttcctgaacaaggtctccagctacttcctgcaggtgcgttcaggctggcaacagagccgtacctcactgggatggagctcccagaggaaggaacaggctgccatctttactgtttggcagccttcactgttgccaccttcaggtactggaaaatccaaggtgaccggggactggagtggacccccattatactgcagcattcctatggagaagtggacagacactttgttacatgggtccctgatcctgtatctcttcattcaactggtcctcctggcctgggtctccagccaactgccaccagagctattgagccagcagcaattctgcaacttcccaagacagaactcccagtgagagggactggttgccatctttgtgatctcacaaccctcaaccttgctgtctccaggctctgaaaattcttcagggaccagaggctggtgaagacccccagtacagagcatccacttcatggaaaaaaggccagactcttctttatgcaggtcctgatccacacttctccttactgggaaggaatgctcaatctgggactccagcataaccaccctgcccccacctgatcagttcgatcagaggcagcccagaagtaaaaggaacaaccacatgcagagaggagaaagaactaatgaaagaactctggcaactcaaatggtcagagtgtcttatgtcctccaaacaactacactagttcaccaacaaaggttcttaatcagcctaagttggctgaaatgacagaaataaaattcaaaatatggataaaaatgaagatcattgaaattcatgagaatggcaaaacctagtccaaggaaactaagaatcaaaataagaagatacaggagctgacagattaaatagccagtataaaaaagaaactgatctgatagagctcaaaaacacactacaaaaattgcacaatgtaatcacaattattaacagcagaatataccaagctgaggaaagaatctcagaacctgaagactggcttttggaaataggactgtcagacaaaaataaagaaaaggaatgaaaagcaatgaatgaacctctgaaaaatatatgattatataaagatgccaaatattaaaattattgacatcatagaaaggggtgagtagaaaggaaacaacttagaaaacatatttcaagatatcatccatgagaatttccccaacttcgctagagagaccaatagtaaaattcaggaaatacagagaacccctgcaagattttatgcaaaaagataatctccaagacacagagtcatcaaattttccaaggttgaaatgaaagaagtaatgttaaaggcagctagaagtaaaggccaagtcacctacaaagggaacctcattgagctaacagtggacctctcagcagaaattctacaagccagaagagattgggagcctatattacattcttaaagaaaaatgtttcaaccaagaattttataaccagtcaaactaagcttcctcagcaaagcagaaatgatatccttttcagataagcaaacactcagagagtttgttatcatcagccctgccagatgagagatcatgaaaggagcactaaatatgaaaaggagaccattaccagccaatactaaaacatacttaagtacaccaaccagtgacactctacagcaagcacacaaataagtcagcacaatagccagctaaaaacacaatgacagtatcaaatccacacatataaatactaactttgaatgtaaatgggctaagtgccccatttaagaggcacagagtggaaatctgtgtaataaaagcaagacttaatgttatgctcttcaaaacacccatcgcacatgcagtgacacttataggctcaaaatacagggatggaggaaaatctaccaagcaaatgggtaacagaaaaaatcaggggttgtaatccaaatttcagacaaaacagactttaaaccaacaaagatcaaaaaagacaaaaaggggcattatataatgataaaacgttcaatttaacatgaaaacctaacaatcctaagtatatatgcagcaaacacaggagtacccagattgataaggcaagttctcagagacctatgaagagacttagattcccacataataattggcggagacttcaaaattccactgacagtattagatcatcaaggcagaaaattaacaaaggtatttaggacctcagctcaacattggaccacatggatttgataaacctctgtagaactctccacccccaaaacaagaaaatatacattcttctcattgccacatggcatatactctaaaatcaaccacactattggacataaaacacccctcagcaaaagtagaagaactaaaatcataccaaccactctctctgatcacagtgcaataaaaatagaaaagaaaacaaaaaatcgctcagaactatacaattatatcaaaattaacctgctcctgaatgatttgggggtaaataatgaaattaaggcataaaccaaggagctctttaaaactaatgagaacatagaacacaccagaatctctgggacacaagtaatgcagtgtaagagaaaaaaaaaagtgctaaatgctcatttcaaaaagttagaaagatctcaaattaatgaccaaacatca

SEQ ID NO: 938 - DNA, 6348 bp, Homo sapiens
  source 1..6348: mol_type = other DNA
gcattaccaactaaggtactgactcatctcattggaactgttcagacagtggttgcagcccaaggagggtgagctgaagttgggaagagtgtcaccacatctggaaagagcaagaggtatgggaactccttccactacccaagggaagccatgaggaactatgccatgaggaacagtgcattctggcacagatactgcactttttccacagtcttcacaacccgcagaccaggagattccctcaggtgcctataccaccagggccctgtgtttcaagcacaaaaccttgcagccttttgggcagacactgagctagctgcaggagttttttttttcataccccagtgtcacctggaataccagagagaaagaaccgtttactcccctggaaagggggctggagccggggagtgaagtagtctagctcagtggatcccacccccatggagcccagcaagccaaaatccactggcttgaaattctcactgtcagcacagcagtctgaagttgacctgggaaacaacagcttggtggggggtgggggggcatccaccattactgaggcttaagtaggtggttttcttttcacagtgtaaacaaaggcaccaagaagttcaaactgggtggagtccactgcaactcaggaaagccgctgtagccagactgcctctctagatgcttcctgtctgggcagggtatctctgaaagaaaggcagcagccccagtcaggggcttataaataaaactcccttctccctaggtgagagcacctagggaaaaggcagctgtgggcacagcttcagcagacttaaacgttcatgcctgccagctcaaaagagagcagaggatctcccagcacagtgctcgatctcagactgcctcttcaagtgggtccctgacccccttgtctcctgtctggaagacacctcccagcaggggtcgacaggcacctcatacagaggagccctggctgacatctggcagatgaccctctggaaccaaccttccagaggaaagaacaggcagcaatcattgctgttctgcagcctccgctggtgatacccaggcaaaaagggtctggagtggacttccagcaaactccagcagacctgcagcacatgggctggactgttagaaggaaaactaacaaaatgaaaaaaatagcatcaacatcaacaaaaaggacctccactcagaaaccccatccaaaggtgaccaaaatcaaagaaagaccaaaggtagataaatccaggaagatgaggaaaaaccagtgcaaaaaggctgaaaattccaaaaaccggaatgcctcttctccaaaggatcacaactcctcaccagcaagggaacaaaactgaatggagaatgagtttgacaaattgacagaagtaggtttcagaaggtgggcaataacaaactgctcaaagctaaaagggcatgttctaatccaatgcaaggaagctaagaactttgaaaaaaggttagaggaattgctaactagaataaccagtttatggaagaacataaatgacctgatggagcacgagaacttcgtgaggcatacacaagtatcaataactgagtgatcaagtggaagaaaggatatcagaggttgaaaatcaacttaatgaaataaagtgcgaagacaatatcagagaaaaaagaatgaaaaggaatgaacaaagcctccaagaaatatgagactatgtgaaaagaccaaacctacgtttgattagtgtacctgaaaatgatggggagaatggaaccaagttgaaaaacactcttcatgatattatccaggagatcttccccaacctagcaaaacaggccaacattcatattcaaaaaatagagagaacataaatatactcctcgagaagagcaatccccagacacataatcttcagatttatcaatgttgaaatgaaggaaaaaatgttaaaggcaaccagagagaaaagtctggttacccgcaaagggaacccttcaaactaacagcaaatctctctgcagaaaccctgcaagcctgaagacagtgggggctaatattcaacattcttaaagagaagaattttcaacccagaatttcatgtccagccaaactaagcttcataagtgaaagagaaataaaatcctttacagataagcaaattccggaaattctgtcaccacaagacctgccttacaagacctcctgaaggaagcactaaacatggaaaagaaaagtcggtaccagccactgcaaaaacataccaaattgtaaagaccatcaacactatgaagagactgctcaactaatgggcagaataactagctagcatcataatgacaggatcaaattcacacatagcaatattaaccttaaatgtaaacgggctaaatgccccaattaaaagacacagactggcaaattgaataaagaatcaagaccctttgatgtgctgtattcaggagatccatctcatgtgcaaagacactcatacactcaaaataatgggatggaggaatatttaccaagcaaacggaaagaaaaaaaaaacaggggttgcaattctagtctctgataaaacagactttaaaccaacaaaaatcaaaaaagacagagaacagcattacatactggtaaggggattaatgcaacaagaagagctaactatcctaaatatatatgcacccaatacaggagcacccagattcataaagcaggttcttatagacctgcaaagagacttagaatcccacacaataataatgggagacattaacaccccattgtcaaaattagacagatcaacaaaacagaaaattaacaaggatattcaggacattaactcatctctgggtcaagcgaacctaatagacacctacagaactctctgccccaaatcaagagaatatacattcttctcagcaccacatcgcactaattctaaaattgacctcataattgcaagtaagacactcttcagcaaatgcaaaagaacagaaatcataacaaacagtctctaaaaccactgggcaataaaattagaactcaggattaacaaagtcactaaaaactgcacaactacatgggagctgaacaacctcctcctggatgactactgggtaaataacgaaatgaagggagaaataaagaagttctttgaaaccagtgagaatgaagacacaatgtaccagaatttctgggacacagctaaagcagtgtttagagggaaatttatagcactaaatgcctacaggataaagcgagaaagatctaaaatcagcaccctaacatcaaaattaaaagaactagagaagcaagagcaaacaaaaccaaaagctcacagaagacaaaaaataactaaaatcagagtagaactgaaggagatggagacaggaaagacccttcaaaaaaatcaataaatccaggagctgtttttttttttgaaaagtttaacaaaatagactgctaaccagactaataaagaagtaaagagagaagaatcaaatagaaacaataaaaacagataaaagggatatcaccactgatcccacagaaatacaaactaacatcagagaatactataaacagctctatgcaaataaactagaaaatctagaaaaaatggataaattcctcgacacatacaccctcccaagactaaaccaggaataagtcgcatcccttaatagaccaataacaagttatgaaattgaggcagtaattaatagaataccaaccaaaaaaaagcccaggaccagatagatttgcagctgaattctaccagagttacaaagagaagatggtaccattcctttggaaactattccaaacaatacaaaaagagggactcctccctaactcattttatgaggccagcatcatcctgataccaaaacctggcaaagacacaacaaaaagaaaatttcagggcaatatcctgatgaacatcaatgtgaaaatcctcaataaaatactggcaaaccgaatccagcagcacatcaaaaagcttattccaccactgtcaagtaggcttcatccctgggatgcaagcctggttcaacatatggaaacaaataaatgtaatccgtcacataaacagaaccaatgacaaaaaccacatgattatctcaatagatgcagaaaggccttcgataaaattcaacacccttttatgctaaatactcttaataaactaggtatcgatgaaaagtatctgaaaatattaagagctatttatgacaaacccacagccaatatcatacggaatgaacaaaagctgaaagcattccctttgaaaactagcacaagacaaggatgccctctctcaccagtcctattcgacatcgtattggaattcctggccaggacaatcaggcaagagaaagaaataaaggatattcaaataagaagagaggaagtcaaattatctctgtttgcagatgacatgattgtatatttagaaaacccatcgtgttagtccaaaatctcctttaactgaaaaacaacttcagcaaagcctcaggatacaaaatccatgtgcaaaaaccacaaacatttctatataccaataatagacaaacagagagccaaatcaggagtgaactcccattcacaattactacaaagagaataaaatacctaggattaaaacttataaggaatgtgaaggacctctttaaagagaactacacactactgctcaaggaaatgaaagaggacacaaacaaatggaagaacattccatgctcatgggtaggaagaatcaatatcatagaaatggccatagtgcccgaagtaattgatagattcaatgctatccacatcaagttatcattgattttcttcatagaattagaaaaaaactactttaaattttatatggacccaaaaaagagcttgtataaccaagacaatcctaagaaaaaggaacaaagctggagtcatcacactactttacttcaaagtatactacaaggctacagtagccaaaacagcttggtattggtaccaaaacagatatatagatcaatggaacagatccgaggcctcagaaataatgccaaacatctacaacgatctgatctttgacaaacctgacaagaaaagcaatggtgaaagaattccctatttaataaatgatgttgggaaaactgggtagccatatgcagaaaactgaaactggaccccttccttacaacatatacaaaaattaactcaagatgtattaaagactaaaacgtaagacctaaaaccataaaagccctagacgaaatcctaggcaacaccagtcaggacatagtcatgggcaaagagttcatgactaatggacgaaaagcagtggcaacaaaagctaaaattgacaaacgggatctaactaaactaaagagcttctgcacaccaaaagaaactatcatcacagggaacaggcaacctacagtatgggagaaaatttttgcaatctatccatctgacaaagggctaatgttcagaatctacaagaaacaaatttacaaggaaaaaacaaccccatcaaaaagtgggcgaaggatatgaacagacacttctcaaaagaagacatttatgtgaccagcaaacatgaaaaaaagcttatcatcactggtgcttagagaaatgcaaatcaaaaccgcaataagataccatctcacgccagctagaattacgataattaaaaagtcatgaaacaacagatgctggagaggatgtggagtaataggaatgcttttaaactgttggttggagtgtaaattagtccaaccactgtggaagacagtggtgatttttcaaagatctagaaccaggaataccatttcaccaagcaatccctttactgggtatatacccaaaggaatataaatcattctactctaaagacacatgcacacgtatgtttatggaagcactgttcacaatagcacagacttggatccaacccagattttcatcaatgacagactggataaagaatacgtggcacatatacaccgtggaatactatacagccataaaaaaagataagtttaggtcctttgcaaggacatggttgaagctggaaaccattattctcagcaaactaacacaggaacggaaaaccaaccactgcatgttctcactcctaagtgggagtttaacaatgagaacacatggacaaagggagttaaacattacacaccgggattgtcatggagtttggggctaggggagggataacattaggataaatacctagtgtagatgacaggttgacgggtgcagcaaaacaccatggcaagtgtatacctatgtaacaaacctgcacgttctgcacatgtatggcagaacttaaggtataatactaaaagaaa

SEQ ID NO: 939 - DNA, 6029 bp, Homo sapiens
  source 1..6029: mol_type = other DNA
agtcgtcaggatgagatgagtgggttttcagcccctgagactcccaggtcagctacgtggctgcagcatgggctgtggtacctggtggcagaggtactgcttggatgggccccaatgggaacatgggaggcaatggaagggtctcccatgagtgtgggaaaggcactgaagcagctggaagcacacagcaccaagaagaaatgcacctctgctggcagagtcaagtgggcatttatgactgcactgcaggaagtacatgctcagttcctgtgggacactgcacaggtaagggacctccaggcacaagctgcatgcctgggcacctaaatgcacagcttggagcaaaacttgggggtgaaggacctccaggcacaaatagggcacttataggcccagataaacagcctggaacaggagttagaaacagctgtcagtgtaaccttgagcctgtcctcctgaccagacactcccatttggtctgatgccaaggaggaggaggctcctctgctgagatctcaccccacaatctgtcagaaggtagaacatgagcagccaatgggactccaggagagagcccagggagccccccaccccaccatggtggaacacacttcccgtagtgtttatacccccacggagttgccagagttagtcaagcagtactggcatcatgtgagggagccctttcctgcctggttactttgcctttgggctgaaggagctgatagcattttctgctccacctccgagatagagaagctggcttctatcacaactcacctcttccttcattagcagctgcagctatgccaacagttagcacagaggcaaggtgaccacactttcattgagtggctgatggtagccatatggacgtgtggaatgatgctggagaaataccagaatctgtgagtaaatagaaatcatatactgagttggtgcagatattccagtagatggatatgcagcaggccatgtttgatttgaatacccaggggccagatgatgaacgctttacctcccatatgagggatcttgtgttgggctcagtggctcccactcaacgcgtttggctttctggccactgtccccaacccgtatgtggggagccacagacatgaagtgactacttctatggcagtcctcagggagacagaaagccattggtgggaccagggaatctgcaccataaagaaggggaagctgccccctcctcaggtaaccatcccatgagataaaagagggtcccagcaggtaacttccatgcagatgtggtttgatttaattgcagctggggttccatgaaataaaattgacaagcaatgcaacagaatgctgttggctccgtggaagcaattatccccggagcaacaattccagaaaatgctcaagagggggcaaaacaatgttgttcaacctcatcctgcccagatgcttcagctcaaggactatttgcagatgggcagcaatatggggcctttcctgtttaattagggaactggctgaggtgcccgtctttgaaggatgccagccaaccagaggtcacatgtgaaactggtgatccactggtaacccactaatatatagcagggtccttgtactggtagatactggtgcagactgcagtctagcttataggaatccagtttatagagtagcaataaattccaggataagtttccaggaaaagctgcattcattgatggttatgggggtcagtcagtgaaggtgaaacctgtgtctctgcatcttggccttggctgcttggctccctgcctatatactgtgtatgtctctcccatacctaaatatattctgggggtggacattttgcatggtctggactaaaacaccatggccagagaattcagactctgagttcatgtaataaagccagtaatgcatggatatacacaccaccagccccaagttctgccacaaccccaacgtgttacctccactcatcaataccatttgccaggggggcatacagagataactaagactattaagaagttagaggagctgcaaatagtgagtggcactcatcgcccctaccatttcccagtatggccagtcagaaagcctgatgggacttggcgcatgacagtggattatcgggaactgaatgaagcaacaccccctctgcatgcagctgtaccttccatcatggattttatggaacacttaacaacagaactgggacagtaccactttgtggtggacttagctaatgcattcttctccaatcacattgctccggagagccaggaacagttcaccttcacatgggaaggatcacaatggactttcaccatgctgcctcagggctatgtgcatagccccaccatttgtcatggttttgttgccatggacttagccgcctggaattgtccaaaaggggtcagcctgtttcattatattgatgatattatgattctcttgcagatctagaaggtgcagggcccctcttgcagcaacaattggcagcatgtgggtggaccatcaatgaatccaaggtccaaggacctggattgtctgccaaattgttgggagttatttggttggataagacaaaggccataccagaggccatcactgataaaatacaggcatacccctgacccaccacggtgaggcagctgcagacttttgtgggcttcttggggtattgacaggcattagtgtcccatttggctcaaatgataaaaccattgtaccagttaacaaaacaaggggctacctggaattgggttgatgaggctgaaatagcctttccggccaccaagcaggctattcattagacatgagccttacaagtgattgatcggggcgcccatttgaatttgatgtacatgtggctacagatggttttggctggggcctatggcagtgcattgagcattttagaatgccagtaggcttttgtcccacctacggaagagagctaagctatggtaataattgttagagaagcaattagctgctgcatatgctgctcttcaggcctgtgagaacctgacaggatggcctacagttgtcatgcagatgacttatccaatagcggagtgggtaggttcatgggtaataacccctcagacagggagagtgcagacatccactttagcaaagtggggtgcctacttagagcagcagagtacgctgaatacaagtcccttagcagcagagttaccagaagtcttggggcatgtagtcctaaggcagggtaaggccatggggcctgaggcacccctagaccatgagccatcatcatttaaggaagggtgccctctcattcttgatggacatagtatatagatgggtccagccaagttgctactgctgcctggactgctgtagcagtccagccgaccactcacaccatatggttttatactggatgtggacaaagcagccaatgggctgaactcagagtggtgtggatggtgattaccaaggaggagtcacctatggtaatctgtaccaatagctgggcagtctattgagggttaacctggtagttgactacctggaagttatagaattggcttgtaggccatcggcccatttggggccaaaccatgtggcaagacatctgggaaatgggtcatcaagtgtcaggccatatgcctttgaccacccccagtaatgatgaggcaaatgcattgaccaaagttcaatggttagagttggcacctacatgagatgtggctttgtggctacacagaaaactgagacatgggggtgggggtgtaaactggtgcaacaggtcagtgggtgctgaggtttgtctttgccctcacaggacattttggaggcctgccagaagtgctcagcatgcactcaggcatacccgagatatagacaactgcccagtgtgacacaacaagtgatggtaaggcagatgcccttgaccacatggcaaatagattacattgggccactgccaaaatttcagggctacacacatgcactgatggctgtagacatggccaccggcttgttgttcacctacccttgcagggtggccgaccagcaacacactatttaaaccttggagcatgtatgtgccttatacagccattccctggccattgaaagtgataggagaacacatttcactggacagcaggtacaacaatgggcagagcagatagacatacaataggggtttcatgtttcttataacccacaaatcactggcatgattgagcaacatagtggatcctgaagaatgggttacatttgcatgttactcacccatctttgtggggctggagttccaggttggacttggtgctccaaatcttgaatgagtggccacggaaaggtggcccagccccagtggaggcactgttacactgggccactgcccctatccagcacagatacagaccaaggatgacctcctctgaccaggtatggggacaaatggtcatctgttgttgcctgccccaatgccccagaaggcaggagaacagaaaacctggtgttgaccatggaccctccaagcacactattgcagatggttggctatcatagccccttgtggggaggacctgcagtgtgacttacatgttactcctagggtatttactgtgtggcctccacaattgacaattcataggggaatggccagggaagggaccctcccctgggggacataggtactgtctgtgtgacccagctcccctgtgactttagcatgagcacaagacacaaaataaccacggagagctgataagatgtggtaccatcgcctagggaagaagccattggtgactgcatagttatccagaaataaaaagtgggctcgtattttgcctgagggacgtgatttacccctcttagtacctgtgcctgctttgccattttggccacaggttgacatgctacaacagcatcgtggactaggcccacacctatgctgaggtgaccaatgtctccaactgttggatctgcaccacctttccagcagcagctgcagatggcttgccctggcacatacatccagcttctgtgcagaactggacatggctacagacttggggtcccacagacaacggatgggatgcaacacggtgtgctttggatagggggtgttgtaaaacccatggcaagcctctccccttgctgactcatagtgtccatgatggatgatgctggctaatgggagaaaacatggtgccctcattgcaggcaccacaatgtatagagcaacactggggtaaagtcaatgtcagaaggttgcccaccgaggcctgtgcaaacataacacgtgtcacaacaccaagggtgtagtggaacaagcagtcttaccaaggctggtccccaatggacgttgtgccctctgggagtttatgggtctgtggggacataggatggccatatctgccagccaattggaccgaatgttgtacctgggggtggccttatgtgcttcccacattgcctagtcgctctcacaactgggaggcattgcattcccagtttttgtgagtgtggccgggcccctggtggttctactctttagcaataactatgcttggagcgggtgtaatcactgtagaaatgcaggttacagccctttcagagcacagagctcagaacctgaattgcacccatgttatcctccttttgtttactgatgaggttgatcacattaggaaggcggtgctgcaaaaccggatgtccttagacatagtcaccactgcccaaggtggcactgtgcccttgtagggacacgatgttgtacatttatccctaacaaccaccagaacataacagcagctttacagggggtgtcatggtaaattaaagtgattgaatgctttactgatgaccccctgtagagacggtgggcatccctgagctttggcctatgttgggctgtcataatcataggtagcatagcgggaatatcagtggtacgttgttcctctctgtattattgctatggcctatgggttcagggtgctgccctatgggcacgggtcaccactaagaggaccccttcatcctaggggatg

SEQ ID NO: 940 - DNA, 3623 bp, Homo sapiens
  source 1..3623: mol_type = other DNA
aggggaacaagatggtggaatagaaggctactccagttattcctcccacaaggaaatcaagttaacaaatatctacacagataaaaacaatttcacaagaaccaaaactcaggtaagcacacacagaacctgattgtaacttcatattgctgaaagaagtactgaaaagagaaaaaacagctctgaatcattgacaccacccctaccccaacttcccagcagcagctgaatggcacagagagtatctctgtaccctggggtaggaagaacacagcaattgtgaggcatcaaagtcagtattgtcttgttagaacagaaagaaaaatctgaccaaactcagctgatgctcacctatggagggagcacttaaaccagccctagccaacagggaattgccagttcctgtagtttgaacttgagtttctgaaaaccacaccactgagggctatagcactctgtcttcaagtacacttgataggcaacctaggtcataaagctgcaactcttaggtgagtcctagtgctaaactaggcccaaagatagtgaacactggggtggggacatgtgacatactgagacatcagctggggcagccaggggagggctgacattatccttccccttaccctaggctgtacagctcctggcttcaaaagagaccccttccttcagcttgagggaaggatatggaagaatggggaggagtttgtcttctatcttgaataccagctaggccacaacaagatagggcactggtcagagtcataaagctaccattctaagacctagctcccagatatttccagacacactctgggttagaggggaacatgctacattgaagaaaaggacagccatgacagcattcatcacctgctaactgaagaaccctagggccatgaataatttgcagtgatacagaggcaccctgtcaaggaccatggaagagcccctgagatgtgctgacatcaggtgagactcagcacattaccagctgtggtgactctgaggcaaaacttctttttcttgtgaaaagcaaagagaaaagtaaaggggactttgtcttgcacctttcatacaggcttggtcacaggaaggtagagcaccaagcaggcacttgagatccccaatatcaggacttgactcttgtatggcatttctggatctgctatgggacagaggagagcccactgccctgaagggtgagtcccaggccaggcagtattcatgacaaactgacttaaaagaccctcggctttaaaggaacatcaggagtaaactgacagtacttctcatggtctggagtggcagtgactacctttggaaagaggagagaaaagtgagaaacactgcatctttttgtttcagggtcagctcagctgcaaaataatagaaaaacagttagacttctaaggtttttgactctagtctctaactcctgcatggcaactctggactcacatgaggcctgggggacagtacctccctgaagggaaggaaacaggccttgctggctttcccacctgctgattttagaaccccagggccttgggtgaacataggcaatagccaggaagttgctacagcaggccttgggtgaggtccagtgctgtgctggcttctggtctgactcagctcagtcatagcagtagtggccacaggggtgtcttatgtcgctccatctctggctttaggtggctcagaacagagagagactctttacttttgggataaagtgaaagaagagtacagtcatctctgcctggtaatccagataattatctggaccttgttcaaggtcatgaacatggtatgtctgagtctacaagaaccacaccattactgagcttaggctgctctctaaagcagatacagcatagatcacaaaacccaagtcctttaaaatatctggaaagccttcccaagaaggatacatacaaacaatcccagacagtaaagactacagtaaatatctacaacgttcagaaactgtagaacatctactagaatcatcacaatccaggaaaacagtacctcaccaaatgatctaaatgagctaaaagagaccaatcctggtgaaacagagacatgtgacctttcatacagatatttcaaaatagctgtgctctgaaaactcaaagaaattcaagataacacagagaaggaatttagaattctatctaataaatttaataagagattaaaatttaaaaattcaaacagaaattctgtcgtgggaaaacgtaattggcacatgaaacaatgcatcagagtttgttaataacataatggatcaatcataagaaagaattagtgagcttgaaaacaggctctttggaaatatacattcagaagagacaaaagaaaaaaggaagtaaaaacaacgaatcaaacctataggatctagaaaatagtctcaaaagggcaaatccaaaagttattgaagaaaagaataaaaaggaattaacaaagcctctgagaaataggggattatataaagagatcaattctatgaatcactggtatccctgaaagggaggaggacaaagcaaacaacttggaaaacgtatcttaggatatcatccgttaaaactatcccaaccttgctagagaagacaatggtcatattcagaaaatgcagagaactcctgcaagattctacacaagaagatcatccccaatgcatataatcaacagattcgcaaggtcaaaataacagacagaatgttgaagccaattaaagaaaaagggaagatcaccttaaaagggaaccccattaagctagcagcagatctctcagctgaaatgctacaaaccagaagagaaatggggtgtatattcaacattcttaaaaaaaaaattcaatcaaaacgtttatatcaaggcaaactaagcttcataagtgaaggagaaataggatctttttcagataagcaaatttttttcccaccagacctgccttacaagagatcttgaaaggagtactaaatagggaaagaccactaccagctaatagaaaaacacacttaaatacacagacaagtgacattataaagcaaccacaaaaacaagccagcataattatctaacaacacaatgacaaaatcaaatttacacatatcaatactaaccttaaatgtaaattggctaaatgcctaacttaaaaggcaaggagtggcaaactggataaaaaaaagcaagactcaatgttatgctgcctttaagagactcatctcacacgtaataacaccaataggctcaaaataacagaatggagaaaagtttaccaagctaatgaaaaacagaataaaagcaagggttaacatcctaatttcagacaaaacagacttcaaccatgatcaaaaaagacaaagaaggacattacataatgataaaaagtacaattcaacatgtagacttatctatgctaaatctctatacacccaacacaggatcccacagatttataaagaaagaccttagagatctacaaagagacataaactcccacacaataatagtgagagacttcaatactacactgacagtatcagagagatcattgaggcagaaaattaataaatatattcaggatctgagctcaatattggaccaaatagatc

SEQ ID NO: 941 - DNA, 6030 bp, Homo sapiens
  source 1..6030: mol_type = other DNA
agggaggagccaagatggccgaataggaacagctctggtctacagctcccagcgtgagcgacgcagaagacggtgatttctgcatttccatctgaggtaccgggttcatctcactagggagtgccagacagtgggcgcaggccagtgtgtgtgcgcaccttgcgcgagccgaagcagggcgaggcattgcctcacctgggaagcgcaaggggtcagggagttccctttccgagtcaaagaaaggggtgacggacgcacctggaaaatcgggtcactcccacccgaatattgcgcttttcagaccggcttaagaaacggcgcaccacgagactatatcccacacctggctcggagggtcctacgcccacggaatctcgctgattgctagcacagcagtctgagatcaaactgcaaggcggcaacgaggctgggggaggggcgcccgccattgcccaggcttgcttaggtaaacaaagcagccgggaagctcgaactgggtggagcccaccacagctcaaggaggcctgcctgcctctgtaggctccacctctgggggcagggcacagacaaacaaaaagacagcagtaacctctgcagacttaagtgtccctgtctgacagctttgaagagagcagtggttctcccagcacgcagctggagatctaagaacgggcagactacctcctcaagtgggtccctgactcctgacccccgagcagcctaactgggaggcaccccccagcaggggcacactgacacctcacacggcagggtattccaacagacctgcagctgagggtcctgtctgttagaaggaaaactaacaaccagaaaggacatctacaccgaaaacccatctgtacatcaccatcatcaaagaccaaaagtagataaaaccacaaagatggggaaaaaacagaacagaaaaactggaaactctaaaacgcagagcgcctctcctcctccaaaggaacgcagatcctcaccagcaacagaacaaagctggatggagaatgattttgacgagctgagagaagaaggcttcagacgatcaaattactctgagctacgggaggacattcaaaccaaaggcaaagaagttcaaaactttgaaaaaaatttagaagaatgtataactagaataaccaatacagagaagtgcttaaaggagctgatggagctgaaaaccaaggctcgagaactacgtgaagaatgcagaagcctcaggagctgatgcgatcaactggaagaaagggtatcagcaatggaagatgaaatgaatgaaatgaagcgagaagggaagtttagagaaaaaagaataaaaagaaatgagcaaagcctccaagaaatatgggactatgtgaaaagaccaaatctacgtctgattggtgtacctgaaagtgatgtggagaatggaaccaagttggaaaacactctgcaggatattatccaggagaacttccccaatctagcaaggcaggccaacgttcagattcaggaaatacagagaacgccacaaagatactcctcgagaagagcaactccaagacacataattgtcagattcaccaaagttgaaatgaaggaaaaaatgttaagggcagccagagagaaaggtcgggttaccctcaaaggaaagcccatcagactaacagcggatctctcggcagaaaccctacaagccagaagagagtgggggccaatattcaacattcttaaagaaaagaattttcaacccagaatttcatatccagccaaactaagcctcataagtgaaggagaaataaaatactttatagacaagcaaatgttgagagattttgtcaccaccaggcctgccctacaagagctcctgaaggaagcgctaaacatggaaaggaacaaccggtaccagccgctgcaaaatcatgccaaaatgtaaagaccatcgagactaggaagaaactgcatcaactaatgagcaaaatcaccagctaacatcataatgacaggatcaaattcacacataacaatattaactttaaatataaatggactaaattctgcaattaaaagacacagactggcaagttgcataaagagtcaagacccatcagtgtgctgtattcaggaaacccatctcacgtgcagagacacacataggctcaaaataaaaggatggaggaagatctaccaagccaatggaaaacaaaaaaaggcaggggttgcaatcctagtctctgataaaacagactttaaaccaacaaagataaaaagagacaaagaaggccattacataatggtaaagggatcaattcaacaagaggagctaactatcctaaatatttatgcacccaatacaggagcacccagattcataaagcaagtcctcagtgacctacaaagagacttagactcccacacattaataatgggagactttaacaccccactgtcaacattagacagatcaacgagacagaaagtcaacaaggatacccaggaattgaactcagctctgcaccaagcagacctaatagacatctacagaactctccaccccaaatcaacagaatatacatttttttcagcaccacaccacacctattccaaaattgaccacatagttggaagtaaagctctcctcagcaaatgtaaaagaacagaaattataacaaactatctctcagaccacagtgcaatcaaactagaacgcaggattaagaatctcactcaaagccgctcaactacatggaaactgaacaacctgctcctgaatgactactgggtacataacgaaatgaaggcagaaataaagatgttctttgaaaccaacgagaacaaagacaccacataccagaatctctgggacgcattcaaagcagtgtgtagagggaaatttatagcactaaatgcctacaagagaaagcaggaaagatccaaaattgacaccctaacatcacaattaaaagaactagaaaagcaagagcaaacacattcaaaagctagcagaaggcaacaaataactaaaatcagagcagaactgaaggaaatagagacacaaaaaacccttcaaaaaatcaatgaatccaggagctggttttttgaaaggatcaacaaaattgatagaccgctagcaagactaataaagaaaaaaagagagaagaatcaaatagacacaataaaaaatgataaaggggatatcaccaccgatcccacagaaatacaaactaccatcagagaatactacaaacacctctacgcaaataaagtagaaaatctagaagaaatggatacattcctcgacacatacactctcccaagactaaaccaggaagaagttgaatctctgaatcgaccaataacaggctctgaaattgtggcaataatcaatagtttaccaaccaaaaagagtccaggaccagatggattcacagccgaattctaccagaggtacaaggaggaactggtaccattccttctgaaactattccaatcaatagaaaaagagggaatcctccctaactcattttatgaggccagcatcattctgataccaaagccgggcagagacacaaccaaaaaagagaattttagaccaatatccttgatgaacattgatgcaaaaatcctcaataaaatactggcaaaccgaatccagcagcacatcaaaaagcttatccaccatgatcaagtgggcttcatccctgggatgcaaggctggttcaatatacgcaaatcaataaatgtaatccagcatataaacagagccaaagacaaaaaccacatgattatctcaatagatgcagaaaaagcctttgacaaaattcaacaacccttcatgctaaaaactctcaataaattaggtattgatgggacgtatttcaaaataataagagctatctatgacaaacccacagccaatatcatactgaatgggcaaaaactggaagcattccatttgaaaaccggcacaagacagggatgccctctctcaccgctcctattcaacatagtgttggaagttctggccagggcaatcaggcaggagaaggaaataaagggtattcaattaggaaaagaggaagtcaaattgtccctgtttgcagacgacatgattgtttatctagaaaaccccatcgtctcagcccaaaatctccttaagctgataagcaacttcagcaaagtctcaggatacaaaatcaatgtacaaaaatcacaagcattcttatacaccaacaacagacaaacagagagccaaatcatgggtgaactcccattcacaattgcttcaaagagaataaaatacctaggaatccaacttacaagggatgtgaaggacctcttcaaggagaactacaaaccactgctcaaggaaataaaagaggagacaaacaaatggaagaacattccatgctcatgggtaggaagaatcaatatcgtgaaaatggccatactgtccaaggtaatttacagattcaatgccatccccatcaagctaccaatgactttcttcacagaattggaaaaaactactttaaagttcatatggaaccaaaaaagagcccgcattgccaagtcaatcctaagccaaaagaacaaagctggaggcctcacactacctgacttcaaactatactacaaggctacagtaaccaaaacagcatggtactggtacaaaaacagagatatagatcaatggaacagaacagagccctcagaaataatgccgcatatctacaactatctgatctttgacaaacctgagaaaaacaagcaatggggaaaggattccctatttaataaatggtgctgggaaaactggctagccatatgtagaaagctgaaactggatcccttccttacaccttatacaaaaatcaattcaagatggattaaagatttaaacgttaaacctaaaaccataaaaaccctagaagaaaacctaggcattaccattcaggacataggcgtgggcaaggacttcatgtccaaaacaccaaaagcaatggcaacaaaagacaaaattgacaaatgggatctaattaaactaaagagcttctgcacagcaaaagaaactaccatcagagtgaacaggcaacctacaacatgggagaaaatttttgcaacctactcatctgacaaagggctaatatccagaatctacaatgaactcaaacaaatttacaagaaaaaaacaaacaaccccatcaaaaagtgggcgaaggacatgaacagacacttctcaaaagaagacatttatgcagccaaaaaacacatgaagaaatgctcatcatcactggccatcagagaaatgcaaatcaaaaccactatgagatatcatctcacaccagttagaatggcaatcattaaaaagtcaggaaacaacaggtgctggagaggatgcggagaaataggaacacttttacactgttggtgggactgtaaactagttcaaccattgtggaagtcagtgtggcgattcctcagggatctagaactagaaataccatttgacccagccatcccattactgggtatatacccaaatgagtataaatcatgctgctataaagacacatgcacacgtatgtttattgcggcactattcacaatagcaaagacttggaaccaacccaaatgtccaacaatgatagactggattaagaaaatgtggcacatatacaccatggaatactatgcagccataaaaaatgatgagttcatatcctttgtagggacatggatgaaattggaaaccatcattctcagtaaactatcgcaagaacaaaaaaccaaacaccgcatattctcactcataggtgggaattgaacaatgagatcacatggacacaggaaggggaatatcacactctggggactgtggtgggttcgggggaggggggagggatagcattgggagatatacctaatgctagatgacacattagtgggtgcagcgcaccagcatggcacatgtatacatatgtaactaacctgcacaatgtgcacatgtaccctaaaacttagagtataataaaaaaaaaaaaa

SEQ ID NO: 942 - DNA, 5191 bp, Homo sapiens
  source 1..5191: mol_type = other DNA
caagatggctgactagacatagccaagggaaacatcttccaccaagacaccaggaaatcaagacgactggtacaatttgagtgcatctttggatggaaggcaatgtgagtggatgaggggaggacatagatgctgaaatgatgtgggagaagtctgagaagcctgcatggggctctcaagtattaggatatgttctgtgccctagttatttctggggaagggatgacttgagcaggcaaggagtgttctgctctcaccatggacctctggaatcttagcagtaagagaccccacaacccccacaaaaacttgacattgcagacacctatgctaaaagaggtggcaggggcagccctatggcctctgtgaagctcagagtgtttagtatgtgaagaatcacaatggagcgtgggcatggatacccatccttcaaggctctccatgctcccctaagagactttggccttggagtgactgtttgatttggataagtgggacagggcccgtctgatctgtactccccactgtctgcttgccttctttggggccccagccaggctgtgctcacctgcagcagagccccagattcccaaccaaagtacttctacatggctttcatcatagcttcttcaccaacaaactgcctgacggtagcagttctagcagtccatccttcactgatgctcatcagcacaactacagcctccccttgtagctctgacagtacaaacatacccatgccttccatccccactaccaccactttgctggcattcatgcatgggcagacttcagcttacctcctccaccagtgtaactatactcatgaagactactgtaccaccattgatggcaggtgcacaccatgacacacctgtccactaatgcatgggtccctcccatgtcacctttgacagtacacatgcacacagggacatgcataaacctacctagaccatgttgcactgccgcctgtgcaaacatgcacacatacatcagtaaatccaccactaccagcgccccattctcactcctgccaccactacatgtataagcacagttgtcaacaaccctaatcttgccaagatccacccatgatgcattaccactgccacttgtgagacttcatacaggattgctgccacctaactcccaccagttccctgacctagctgatgcacatgcaccctgtggcactgctgcagctggtagcatgcgcaagtgacaatgaatgacccttccattgccctaatgaaggccttgagtcagcatcaccaatcagactaggaatagactaggaacaccctggctcctccagtgcagtaggttcctgaacttaaggggatagagaacaaaactgaggacccaatagcatccccccagagttagaacacacagcacaagagtgctgagcacaaccttggcctgttaaaatcttccagaaattaagccagttgacttaatgaattttaaatcaaaatcaaacccccaagggcatcaaagaaggtaacagctaaagaataacaacttcaaagattaaaggatcatcagctcacaaaaatgaaaaagaaccagtgcaagtaatctggcaactcaaaaagccagagtatcttcttacctccaaatgaccacaccagttcctcagcaatggtttttaaccaggtttaaattgctgaagtgacaagcatagaattcagattatgaataggaatgaagataatcaagattcaacagaaagttaaaacacaatgtaaggaaactaaggaatataataaaataatacaggatataaaagataaaatggccatttcaagaaagaatcaaactcatctgatagagcttaaaaattcacttcacaaatttcataatagaatcacaatattagcagtagagtagaataagctgagaaaagagtctcagaatttgaagactagttatccaaattaaagcagtcagacagaaattaataaaggagaataaaaaagaatgaaaaaaacctcttggaaatgtgggattacgtaaagagaccaaatttatgactcattggcatccctgaaagagagggagagaaaataagcaacttgaaaaatatacttgaagatataatctatgaaaatttgcccaacctcaatggagaggccatcattcaaattcagaaaatgcagagaactcctttgagatcccatagaaggtgaccatcccaagacacatagtcatcagattctctaaggttgaaatgaaagaaaaaatgttaaagacagctagagaggaggggcaggtcacttaccaaaggaaccccctcagtctaacaggtgaccattcagcagaaaccctacaggcctgaacagattgggggtctatattcaggattcttaaagaaaatcaattccaaccatgaatctaatatccagccaaactaagcttcataagtgaaggagaaataggatccttttctgataagcgaatgctaagggagtctgttatcaccagacatgccttgcaagaggtccttaagggagtgctaaatatgaaaatgaaagaccattaccagtcaccacaaaaacacacttaagtacatagatagtagaaactataaagcagttacacaatcaagtctacataataacaggtaacaacatgatgacaggaccaaatccacacatatcattattaacatttaatgtaaatagaataaatgcccccacttaaaaggcacagagtgccatgttagatagaaatgcaagaccccactaaatgctgtcttcaggagaccaatctgacatgccatgacacccataaactaaaagtaaagagataaagaaaaatgtatcatgcaaatggaaaacagaaaaaagtagaaattgttattttaattttagacaaaacaggctttatattgatattgatcaaaaagacaaataaggacattacataatggtaaatggttcaacaagaagacctaagtgtcctaagtataatgcatccaacacaagaggacccagactcacataacttgttattagaaacctaaaaggagacttagataatcacacaaaaatggtggaaaacttcaatatcccactgacagtattagacagatcatcaagtcagaaaactaacaaagatattcagaacctgaactccatattcaaaaatgggcctaacagatatctacagaactctccacccaaaaccaacagaatattcattcttctcatcaccacatgacacagagtcgacaatcaaccacacattaagccataaaacagttctcagcaaattcaagaaactgaaatcataccaaccacactgtcagaccacagtgaaacaaaaagagaaatcaacactaagaagatggctcaaaactgtagaaccacatggaaacaaaacaacttgctccagaataaatttggcttaaggataaaattaaggcaaaaataaaattctttgagactaatgaaaataaagatacaaaataccagaatatcaggtacccgcaaagcagtattaaagggaaaatttatagcactaaatgtgcacgtgaaaaagttacgaagatctcaagttaacaacctaacataaaaactacaggaagtagaaaagaaagagcaaaccaaactcaaagctagcaaaagacaataaataaccaaaattagagaagaagtgaatgaaattgaaacacaataaaattacaaaacagatgaatctaatggtggttatttgaaagattagataagattgataaacttctagctacactaatgaaaaaaagagagaagatttaaataaacacaatcagtaatggcaaaggggacattatcactgaccccacaaaaacacagaaaaccctcagagactactacaaacacctctatgcacacaatgtagagaaccttcaagagatggataaattcctggaaacatacatcatctccagacaaaaccaaaaagaaattgaatccctgaaaataccaataaggtgtcctgaaatagaatcactagtaaaaatcctaccaactagaaaaagcccaggaacagacaaattcacagccaaattctatcagacgtgtaaagaaaaactggtaccatttggtaccactggtaccaccaaaactatttcaaaaaaataaataaaaaataataagaagaaggagggaatcctccttaaaccattttatgagcccggcatcattctgatgacaagacctgacaaagacacgtacaccaaggaaatttcaagccagtatgcctgatgagcatggttgaagaacatcttcaacaaaatactcgcaaaccaaatctaggagcacatttaaaagctaatccacaatgattaagtagacgttatctttgtaatgtaaagttggttcaaactacacaaatcaataaatgttattcatcatttaaaagaactaaaacaaaaatcacacaatcttctcaatagatgcagaaaagacttgataaaattcaatatccttcaggttaaaaactctcaacaaactaagcatttaagggacatacctcaaaataatgaaacaaatctatgtccaacccacagctagcatcatactgaatgggcaaaagctggaagcattccccgtgagaaccagaacaagaaaaggatgcccattatcaccactcctattcaacatgttactggaagtcctagccagagaaatgagacaagagaaagaaataaaaggcacctaaataggaggagaagaaatgaaactatctcagtctgcaaacaatatgattctttacctagaaaacaacgtagtctttgcccaaaagctcctatatctaataaacaactttagcaaagttcttgcatgcaaaatcaatgtgtaaaaattggtagcatttctatgcactaacaacatgcaagctaagggccaaatcaagaatgcaatcccatttacaatagccacaaatagaataaaatacctagaagtacagctaaccaggaagatgaaatatctctacaatgagaattacaaaacagcactgaaaggaatcacagatgacacaaatggaaaaaacctatccatgctcattgatagggagaacaaatattgttaaaatggtcattctgcccagagcaagttatagattcaacgctattactatcaaactaccaatgagagtctgcacagaaataggaaaaaaaaagctattttaaaattcatat

SEQ ID NO: 943 - DNA, 5058 bp, Homo sapiens
  source 1..5058: mol_type = other DNA
caaaaatcaggtgggccctcatagtacctggtttgaattacacattgctgaaagaggcacagaagagtaataataatcaatcttgaattgctgatgtcacccctcccccatcccctggcagtggctgcatgatgccaagagcatctctgggcactgggagagggagagcatagaaattgtgaggcagcaaattcagtactgtcctgttagagcagaaaagaaaattcgagaaaactcaattgacacccgtcctcagagggagaaattaaaccagccctagccataggggaattactgttctcggtgctctaaacttgagttcctgcaaaccttgccactgaggtataaactgctctgaatctctaagtaaaattgaaaggcagtttaggctataaggacttaaactcttagatgagtcctagggctgaactgggcccagagacagtggatcatgggggagcatcccatctactgagacaccagctggggcagctaagggaatgttggcatcacccttcctctaacactagactgcacagcttgcacctccaaaagagaccccttccttccacttgaggagaggagaggaaagagttgggaggaatttgtcttgcatcttggataccagctcactcacagaaggatagggcactagtcagagtcatgagggcctcattccaggccctagttcctggatgacatttctagacacaccctcggccagaagggaacctactgccttgaagggaaggacccagtcctggaagaatttgtcacctgctaaattaagagcccttgggaccagaataaccagcaagaatacccaggtactatgtccagggctttggatgagcttctgaggcttgctggcttcagataccagcatcgacacagggagatagagcgccaagtgggctcttggggtccctgattccaggatttgactcttggatggcatttgggacctgctctgggccaaaatggagcccactgccctgaagcatgaatcccaggtgaagtaacattcaccacaaggtgacttaagagcccttgggccttaagaaaacactggtgatagctgggagtatcctgtggcctgtggtggcagtggctatgtggtaaagtaagtttggaaaggggagggaagagagggaaggtctgtatcttgtagtttgagtgccagctcagctgcagcacaatagaacacaaagtagaattctaaggttgttgaatctagtccctgacccccgtatggtaactctggacacacctggggcctgagggaactcattaacctgaagggaaggacacaaatctggttggatttgctacctgctgattgtagggccctaagaccttaacaaaaaaggcagtagacagggagcgtttacaacaggccttgagtgagacccacgtttgtactagcttcaggtctgacccagtgcagtcatagtgttggcccaagaggtgtttgtgtcacttgaccttcaactttaggtggctcagaatagaaagactccctttgtgtggaagaaagtaaaggaagagaaaaagaatctcagcctggtaatgcagagaattctccacaatcatgaccataaaggcagtacctctacatgtctaaaataaccacaatgttactgcactttgggtgccctcaaagctgatacagcttaaattacagcacccatgtccttgtaaatgtctggaaagcctttccaagaaggacaggtactgataagcccagagagtgaagattacaataaatacctacctcttcaatgcccaggcactgaaaaacatctattaacatcaacgccatccaggaaaacataacctcaccaaatgaattaagtaaagcagcagggatcactcctggagaaaaagagccatgtgacctttcagagagagaattcaaaatagctgtgttgaagaaattcaaagaaattcaaagtaatgcagaaaagacattcagaattctatcagataagtttaacaaagagattaaaaaagaatcaataaaaattctggagctgacaaatgcaattggcatattaaagaacacatcatagcctttcaatagcagaattgatcaagcagaaaaaaatcagcttgaagacagactatttgaaaatacacagtcagaggagacaaaagtaaaataaataaaaaacaatgaagcattcctactggaactagaaaatagcctcaaaagggcaattctaatggttattggacttaatgaggtggtagagagagagatagggggtagaaagtatattcaataagataacaacagagaacttcccaaacctaagaaatgatatcaattttaaagtacaagaaggtttcagaataccaagcagattcaacccaaagaaaactacctcaaggtatttaataatcaaactcccaaaaattaagaataaagaaaggaccctaaaagcagcaaaagtaaaaaacaaatagatacaatggagctccaatacatctggcaatagatttttcagtggaaaccttacagaccaggagagagtggcatgacatatttatattgctgaagaaaaaaaaaactaccctagaatgatgtatgtggtgaaaatatccttcaaacatgatggataaataaagactttccaagacaaacaaaagctgagggatttcattaacacaagggttttcctgcaataaatgctaaagggagttcctcaagcagaaagaaaatgatgttaataagaaacaagtaattacctgaacatacaaaactcaccagtaatagtaagaacacaaaaacagattactgtagcactataactgtgctgtgtaaaccactcttatcctaagtagaaagactaagcaattagcaaatcaaaataataaccacaacaacttagcaagatgtaggccataccataagatataaatagcaacaacaaaaagttaacaagtagggggatgcagttaaggcttagagtttttattagttttttttttttgcctgcttgttggtttgtttataaaaaacgatgttaatttgttattgggataaaataatgctttatgaaatagtatttgaaagcctaatggtgacctcaaagcagaaaacataaaatggatacacataaaataaaaagcaagaaactaaatcatatcaacagagaaaatcaccatcactaaatgaacacaggaaggaaagaaagagggaagacaagaccacaaaacaaccagaaaacaaataacaaaatggcaacagtaagtctttacttatcaataataacattggaagtaaatcgaccaaactctccaatcaaaactcatacagtggctgaatggatgaaaaaacaggacccattgatctgttgtctacaagaaatacacttttgctataaagacacacaaagactaaaaatacagggatgtaaaaatataatccatctgaatagaaaccaaaaaagagcaggagtcactatacttatatcagacaaaatagatttcaagatgaaaactataagaagagacaaaaaggtcactatatgagataaagtggtctattcagcaagataatataacaatttaaaacattaatatatatgcacccaacactggagcaccaaatatataaagcaaatattactagagctaaagagagagagaagccccaaaacaataatagctgaagaattcaacacctcactttcgacatttgacatatattccagaacagaaataaaggaatatcagacttaatctgcactacagaccaaaaggatctaataaatatttatagaacattttatccaatggctgtaaaatacacatgactgtccacagcacataaatgattgtcaaggatacactgtatgttaggttacaaaataagtcttaaaacattaaaaaaaacttgaaaaaaaaaaatcaagcatctttcttgaccacaatgaaataaaactagaaattaataagaagaaaattttggaaactattcaaatacatagaaattaaacaatatgctcccgaatgacaagtgggtcatgagaaagaagttgatttttttaaaataaattataatggaaacacaacataccaaaacctatgggatatagcaaaaaccgtactaacagggaagtttatagctataagtgcctacatcaaaagtaggaaaaaaaaacttcaatgcatcttaaagaactagaaaagcaagagcaaacaaaactcaaaatcagtagaagaaaagaaataaagatcaaagaagaagtaaataaaatttaaatgaagaaaacaatacaaaagatcaacgaaacaaaaagttggatgtttgaaaagttaaacaaaactgacaaacctctaacctgactaaaaaagaaaaaaataaagagagaaaatccaaataaataaaatgagaaatgaaaaagaagacattacaactgatactgcagaaattgaaagagtcattagtggctactgtcagcaactatatgccaataaattcacaaatctaggagaaattgacaaatgcctggacacataataacataccaagactgaacaaggaagaaatccaaaacctaaacagaccaataacaagtaaagagatcaaagtcacaatacaaatttctccataaaataaaaatcctgagacccaataacttcactactgaattcaaccaaacatttaaaaaataactaataccaaccctgttctaactattctaaaacatagaggaggagaaaatacttccaaacacattctatgaggccagtattgccttgaaaccaaaaccacacaaagatacatcagaaaaagaaaagtacaggccaacagtgctgatgaatatagatataaaaattccccaaaaatactgacaaatggaatccaataataaattaaaaagatcattcatcattaccaagtagaatttattccaggtatgcaaggatggttcaacacacaccaatcaattcatgtgataaaccatatcaacagaacgaatgataaaaaccatgtgatcatgtcaattaatgctgaaaaagcagttgataatattcagcatcccttca

SEQ ID NO: 944 - DNA, 3709 bp, Homo sapiens
  source 1..3709: mol_type = other DNA
attaagcatgtacaaaagatttagaaaataaatttaaaagggcagatcttaaagttattcaccttaaagaaaaggtagagatggggtagaaattttaatcaaaaagataattacagagaaattctcaaacctggagaaaactttccaatatccaagtataagaaggttacagaacaccaagcatatataacacaaataagactacctcaagacatttaaaaagaagactcccaaaggtcaagtatgaagaaagtatcctaaaaccagccaaagaaacaaataacatacaatggagctctgatatgtctggcagcagactcctcagtggaaattttacaggccaggagagagtggcatggcatatttaaagtgctgactgaaaaaacttttaccctagaatagtatatctggtgaatatgtccttcaaacataaagaagaaataaagacattttcacacaaacaaaagctaaagatttccctcaacaccagacatgtctacaagaaatgctgaaggaagtacttcaggaaaacaaacaaacaaacaaaaagcgagattaatgagcaataaataatcacctaaaggtacaaaccttactggtaatagtaagtacataaaaaaacacagaatattataacactgtaactgtgttgtgtaaacaacttttattctaagtagaaagaccaaatgattaactaatctaaaataatagctacaacttttcaagacataatcagtacaataagatataaatagaaacaataagaagttaaaaagttgggggatgaagttaaggtgggtttaaattcattttcaatttgatttatttatgaaaatggtgtgaagctgttatcaggttaacataatctgataaaggtaatattaacaagtctcatggtaacctcaaaccaaaaaacatacatggattcataaaaaaaccaagaatctaaattatatcaccagagaaaataatcttcactagaggaagagaagaaagaatgaaaaaaaaaaaaagagagaagatcacaaaacaaccaggaaactaataagaaaatggcaggagtaagtctttacttatcaataataacattgaatgtaaatggactaaactgtccaatcaaaagacatagattaagtgaatggatgaaaaaaattgcctattgatcttttgcctacaagaaacacatttcacttataaagacacacatggactgaaaataaagggatagaaaagaatatcccatgccaatggaaactaaaaaagagcaggagttgctatacttatatcagacaaaatagaattaaatacagaaactataagaagaaaaaaagccactacataatgataaaatgatcaattttaaaaaggatacataatagcaacgttaaatatatatgcatccaagatggtagcacccagatttataaaggaaatattattagagcttaagagagatatgagcctcaacataataatagctaaaaacttcagcacccaatgttcagcattggacagattttccagacagaatgtcaacaaagaaacattagatttaatctgtactataaactgaatggatctaatgcatatttagaaacaatttcatccaagagctgcagaacacacattctttttttatcatatggattattttcaaggatagactgtatgttaggtcacaaaataagtcttcacgcattgaaaattttaaacaatatgaaggatcttctctgaaaataatgcattaaaactagaatttaataacaagaggaattttgataattatacaagcacatggaaattaaacaatatgcttctgaatgaccactgagttaatgaggaaatttataaggaaactaaaaaagaaattgacaaaaacaatagtggaaacacaacatactaaaacctctgggatacagaaaaagcagtagtcagaggaaagtttatagctttaagtgcctacataaaaaagaggaaagacttcacataaacaatctaaagatgcatcttgaagaactaggaaagaaaagaaaaccaaatccaaaattattagaaaaaaataataaagatgaccttaggaataacattgaaatgaagaaaacaattcaaaagatcaatgaaacaacaagatggttttttggaaagttaaacacaattgacaaatttttagccagactaagaaaaatagagaagatccaaataaataaaatcaaaaataaaactagatattacaacttatactgcagaaattcaacagatcattagtggctgctatgggacactaaatgccaataaattggaaaataaagaagaaatggtcaaattcctagacacatacaacctaccaagatttaaccaggaagaaattcaaaacctgagccgaccaataacaagtaatatgattgaagcaaagagatggataaattcctggaaaaatacagctctcttagcttaaatcaggaagaattagatactctgaactgaccaataacaagcagcgagattgaaatggtaatttaataattaccaacaaaaaaaagtacaggaccagatggattcacagcagaattttaccagacattcaaagaagaatcagtaccagtcattttgacactatttcacaagatagagaaagagggaactctccctaattcatttgatgaagccagcattactctaatatcaaaagcaggaaaggacttaaccaaaaaagaaaactacagaccaatatccctcatgtacatagatgctaaaatccttaacaaaatagtagctaactgaatgcaacaaaatatcgaaaaaaaatccaccatgattaaatgggtttcataccagggatgcagggatggtttaacatctgcaattcaataaatgtgataaaccacataaaaagaattaaaaacaaaaatcacatgatcatctcaatagatacagagaaagcattcaacaaaatacagcatccctttatgattcaaactctcagtaaaattggcatacaagggacatacctcaatgtaataaaacctgtctatgataaacccacagccaaaataatactgaatggggaaaagttgaaagcatccttctgagaaccggaaaaagacaaggatgcctactctcatcactcctcttcaacatagtactggaagtcccagccagagcaatcagacaagagaaagaaataaaatgcatccaaatcagtgaagaggaagtcaaactgtcactctttactgacgatataaccatttacctcaactctaaaaccctaaagactcctccaaaaagctcctagaaatcataaaataattcaacaaagtttccagatacaagattaatgtacacaaatcagtacctcttctatacactaacagtgaccaagcagagaatcaaatcaataactcaaccccttttacaatagctgcaaaaaaaaattaaacttaggaatatacctaaccaaaagacctctatgaagaaaactacaaaacactgctgaaagaaatcatagatgacacaaacaaataaaaacatcccatgctcacagatgggtagaataaatattgcaaaaatgaccatactgccaaaagcaatctacaaattcaacacaatccccatgaaaatactaccatcattctttacagaattagagaaaacaattcgaaagttcatagggaaccaaagaagagcctgcatagccaaagcaaggctaagc

SEQ ID NO: 945 - DNA, 1738 bp, Homo sapiens
  source 1..1738: mol_type = other DNA
cggtctccctctgatgcagaggtgaagctggactgtactgctgccatctcggctcactgcaacctccctgcctgattctcctgcctcagcctgccgagtgcctgcgatcgcaggcgcgcgccgccacgcctgactggttttcgtatttttttggtggagatgggatttcgctgtgttggccaggctggtctccagctcctaaccacgagtgatccgccagccttggcttcccgaggtgctgggattgcagacggagtgtcgttcactcagtgctcaatagtgcccaggctggagtgcagtagcgtgatctcggctcactacaacctccacctcccagccgcctcccttggcctcccaaagtgccgagattgcagcctctgcccggccgccaccccatctgggaagtgaggagtgtctctgcctggccgccatcccatctaggaagtgaggagcgcctcatcccggccgccatcccatctaggcagtgaggagcgtctctgcccggccgcccatcgtctgagatgtggggagcgcctctgccctgccgccccgtctgggatgtgaggagcgtctctgcccggccgccccgtctgagaagtgaggagcccctccgcccggcagccgcaccgtctgagaagtgaggagtccctccgcccggcagccaccccgtctgggaagtgaggagcgtctccgcctggcagccaccccgtccgggagggaggtgggggtcagcccccgccaggccagccaccctgtccgggagggaggtggggggtcagcccccgccaggccagccgccccgtcagggagggaggtgggggggtcagccccccgcccggccagccgccccgtccgggagggaggtggggggggtcagccccccgcccagccagccgcccgttccgggaggtgaggggcgcctctgcccggccgcccctgctgggaagtgaggagcccctctgcccggccagccgccccgtccgggagggaggtggggggggtcagccccccacacggccagccgccccgtccgggagggaggtgggggggtcatcagctcccccgcccggccagccgccccgtccaggagggaggtggggggggtcagcgccccgcccggccagccgccccatccgggaggtgaggggcgcctctgcccggccgcccctactgggaagtgaggagcccctctgcccggccaccaccccgtctgggaggtgtacccaacagctcattgagaacgggccatgatgacaatggtggttttgtggaatagaaaggggggaaaggtggggaaaagattgagaaatcggatggttgccatgtctgtgtagaaagaggtagacatgggagacttttcattttgtgctgtactaagaaaaattcttcttccttgggatcctgttgatctgtgaccttgcccccaaccctgtgctctctgaaacatgtgctgtgtccactcagggttgaatggattaagggtggtgcaagatgtgctttgttaaacagatgcttgaaggcagcatgctcgttaagagtcatcaccactccctaatctcaagtacccagggacacaaacactgcggaaggccgcagggtcctctggcctaggaaaaccagaggcctctgttcacttgtttatctgctgaccttccctccactattgtcctgtgaccctgccaaatccccctctgcgagaaacacccaagaatgatcaataaaaaaaaaaaagaaaaaa

SEQ ID NO: 946 - DNA, 12639 bp, Homo sapiens
  source 1..12639: mol_type = other DNA
tctgagaaacttcgttgtgatgtatgcattaatctcacggagttcaacctatcttttgattgaggagttttgaatctctttttgtagaatctgcaagtggatacttggagccctttccggcctattttggaaaaggaaataagttcacataaaaactacccagaaccataatgagaaactatcttttaatgtctgcattcatctcacagggttgaacgtttcatttgattgagcagttttgaaacactctttttgtagaatctgctattggatatttgtagtgctttgatgcctatggtagaaaaggaaagatcttcacataaaaactacagagaagcattgtgagaaacgtctttgttattagtgaattcatcacaaagagttgtacctttcttttgattgagcagttttgaaacactctttttgtagaatctgcaagtggatatttggagcactttgaggcctatggtggaaaagaaaatatcttcatatgaaaactacacagaagcattctgagaaaattctttgtgatgtgtgcattcaaaccacagacttgaactgatcttttgatagagcagtttttaaagtgtctttctgtagaatctgcaagtggttacttggagacctttgtggaagatggtggaaaaggaaatatcttcccgtaaaaactacacagatgcattctgagaaacttctttgtgatgtgtgcattcatctcacagagttcaacctatcttttcgtagagcagttttgaaactctcttttcctagaatctgtaagttgatatttggagtcctttgcggcctattgtggaaaaggaaataacttcacatgaaaactacacagaagctgagaaacttctttgtgatgtgtgcattaatttcccagagtcgaacctttcttttgattgagcagttttgaaacactctttttgtagaatctgcaagtggacatttgaagcactttgaggcctattgttgaaaaggaaacatcttcatataaaaacaacaaggaagcattctgagaaaccattttgtgctgtgtgcattcacctcacagagttcaactttatttgatacagcagttttgaaacactcttcttgtggaatctgcaagtggaaattgggaaatatttaggcatatggtggaaaaggaaacatccgcacataaaaactacacagacacattctgtgaaacttctttgtgctgtgtgcattcaaaccacagagttgaacctatcttttgaatgagcagttttgaaactctcttttcatagtatctgcaagtggatatttggagccttttgtggcctacggtgggaaaggaaatatcttcatataaaaactacacagaagcattctgagaaacttctcagtgatgtgagcattcttctcacagagttgaacctttcttttgattgagcagttttgaaacactgttttttttagaatctgcaagtgaatatttggagccttttgggtcttattgtggaaaaggaaatatcttcacataaaaactacacagaagcattctgagacacttctttgtggtatgtgcattcatctcacagaggtgaaactttcttttgatggagcagttttggaaatctctttttgtagaatctgcaagtggatatttggagcactttgaggcccattgtggaaaaggaaatatctttacataaaaactacacagaaatctgagaaacatctttttgttgtgcgcattcaactcacagagttgaactatcttttgattgtgcagttttgaaacactctttttgtagaatgtgaaagtggatattttgagcgctttgaggcctattgtggaaaaagaaatatcttcaattaaaaactacacagaagcattctgagaaacttctttgtgatgtgtggattcatctcacagagttaaatctttcttttgattgagcagtttgcaaacactctttttgtggtatctccaggaggatatttggagtgctttgaggcctatgttggaaaaggaagtatcttcccttaaaagctatgcagaagcattctgagaaacttccttctgatgtgtgcattcatctcacctagttgaacctttcttttggttgtgcacttttgaaacactctttttgtggaatctgcaagtggatatctggatcactttgacgtctattgtggaaaaggaaatatcttcacataaaaactacacagaagaattccgacatagttctttgtgatgtgtgcattcaactcacatagttgaaaccatctcttgatcgagtagttttgaacctctcttgttgtagaatctgaaagtggatatttgtgtcccctggcggtctatggtggaaaagaaatatcttcacaaaaatactacacagaagcattctgagaaacttctttgtgatgtgtccattcatctcacagagttgaacctttcttttgattgagcagttttgaaatactccttttgtagaatctgcaagtggatattttgagtgctttgagaactattgtggaaaaggaattatcttctcataaaacctacactgaaggattctgagaaatttcttgtgatgtgtgcattcatctcacagagttgaacatttcctatgattgagcagctttgaaacactgttttttttagaatctgcaagtgaatatttggagccttttgggtcttattgcggaaaaggaaatatcttcacataaaaactacacagaagcattctgagaaacttctttgtcatgtgtggattcatctcacagagttaaatctttcttttgattgagcagtttgcaaacactctttttgtggtatctccaggaggatatttggagtgctttgaggcctatgttggaaaaggaagtatcttcccttaaaagctatgcagaagcattctgagaaacttccttctgatgtgtgcattcatctcacctagttgaacctttcttttggttgtgcacttttgaaacactctttttgtggaatctgcaagtggatatctggatcactttgacgtctattgtggaaaaggaaatatcttcacataaaaactacacagaagaattccgacatagttctttgtgatgtgtgcattcaactcacatagttgaaaccatctcttgatcgagtagttttgaacctctcttgttgtagaatctgaaagtggatatttgtgtcccctggcggtctatggtggaaaagaaatatcttcacaaaaatactacacagaagcattctgagaaacttctttgtgatgtgtccattcatcccacagagttgaacctttcttttgattgagcagttttgaaatactccttttgtagaatctgcaagtggatattttgagtgctttgagaactattgtggaaaaggaattatcttctcataaaacctacactgaaggattctgagaaatttcttgtgatgtgtgcattcatctcacagagttgaacatttcctatgattgagcagtttggaaatattcttttcatagaatctggaagtggatatttggagccctttgaggcctattgtggaaaaggaaatatcttcacataaaaactacagagaagcattctgagaaacttctttgtgatgtgtgcattcatcaaacagaattgaacatttctttttttgtgcagttttgaaacaatcttcttgtagtatctgcaagtggatatttggagcgttttaagacctaaggtgggaaaggaaatatcttcacataaaaattacacagagagattctgagaaacttctttgtgatgtgtgcattcatctcatatatttgaacctttcttttcattgtgcagtttccaagcaatctttttctagaatatgtaagtggatatttggagcactttgtggactatggagggaaaagaaatgtcttcacataaaaactacacagaagcattgggagaaaattcttgtgatatttgtgttcaacccacaaagttgaacatattgtttgatagagcagttgtgaaactctctttttgtagaatctgcaagtgggtatttggagccctttgtggcccatggtagaaaaggaactatcttcacagaaaaactacccagaagcattttgagaaactcctttgtgatttgtgcactcatctcacggtgttgaaactttatttttattgagcaattttgaacattcctttttatagaatctacaagtggatatttggagtggtttgagacctatggtagaaaaagaactatcttcaccgaaaaaccacacagaagcattttgagaagcttctttttgatgtatgcattcaactcacagagacgaactgatcttttgatagagcagttttgaaactcacttttgtagaatctgcaggtggatatttggagtacattgcggcctatggtgaaaaaggaactatcttcgcatgagaaccaggcagaaacattctgagaaactagtttgtgatgtgtgcattcatctcacagagttgaaatcattttttgatttgagtagtttggaaacactctttttgtggaatctctaagggcatatttgaagcgttttgcacgctgttgtggaaaaggaaatatcttcacataaaaactacacagaagcattctgagaaactactttgtgatgtgggcattcatgtcacggttttgaaccttccatttgattgagcagttttgaaatactcgtttggtagaatgtacaagtgaatatttggagcactttgaggcctatgatagaaacggaaatatgtttacataaaaactacacagaagcatgctgagaaacctctttgtgatgtgtgtattcacctccgggagttcaacctatcatttgacagagcggttttgaaactctttttgtagaatctccaagtggatatttggagccctttgcattctactgtgaaaaggaaatatcttcacatcaaaactacacagacgcattctgagaaacttctttgtgatgtttgctttcaactcacagaattgaaccttttgtttgagtagttttgaaactctctttttgtagaatctagaagtggatatttagaacgcttggaggcctatggtgcaaaaacgaataacttcacacaaaaaatacacagaagcattctgagaaacttctttacgatgtctgcattcacctcacagatttgaatgtctcttttgattgagcagtttggaagcactctttcggtagaatctgcaagtggatatggagagagctttgaggcctgttgtggaaaactaaatgtcttcatataaaagctacacagaagcattctgagaaactcctttgttatgtgtgcattcatctcacagagttgaacctttcttttgattcggcagttttgaaacacggtttctgtagaatcttcaagtggatatttggagcacttttctgcctattgtgtaaaaggaaatatctttacgtaagaactacacagaagcattctgagaaacttctttgtgatgttcttaactcacagcgttaaacttacctttggtagagcagttttgaaactctctttttgtggaaaatgtaagtgggtatttagagccatttgtggcctatggtggaaaggaaaatatcttcacataaaaactacacagaagcattctgagaaactaccttttgatgtgtgtatttgtctcagactggaaccttccttttgattgagcagttctgaaacactctttttgtagaatctggaagtgcatatttggagtgctttgaggcctatggtggaaaaagaaatatcttcatttaaaaactacacagaagcattctgagaaacttctttgtgatgtgtgtattcataccacagagtcgaaactatcgtttgagagagcatttcgaaactttctttttgtaggatctgcaagtggatatttggagggctttcaggcctatggtggaaaaggaaatatcttcacataaacactactcagaagcattctgagaaacttcttcacgatggttgcactaaactctcagagttgaacttatcttttgatagagcagttttgaaactctgtgttactagaatctgcatgtggttatttggagtcctttgtggccgatggtggaaaaggaaatatcttcccctaaaaagtacacagaagcattctgagaaacttttttgacatgtgtgcactaatctcacagagtttaatctatcatttgattgagcagttttaaaaaactttttttgtggaatctgcaattggatatttggaacgctttgaggcctattgtggaaaaggcaatatcttcacataaaaactacacagaaacattccgagaaacttctctgtgatgtgtgcactcatctcacggagttgaacctttctttgattgacaagttttgaaagactatgtttctataatgtgcaagtggatatttggagtgctttgaggcatatggtggaaaaggaaatatattcacataaaactatacagaagcgttcccagaaacttatttgtgatgtgtttattcaactcgcagagttgaccctatcttttgatacagcagttttgaaactctctttttgtagaatctgcaagtggatatttgcagcgctttgaggcctgcggtggaaaaggaaatatcttcacataaaaactacacagaagcattctcagtaacttctttgtaatgtgtgcattcacctcacagacttgaaacttcctcttgattgagcagcttggaaacacacttttagtgaaatctgcaagtggatatttggagcaccttgaggcctgttgtggaaaaggaaatatcttcacataaaaactacacagaagcattccaataaacttgtttgtgatatgtaccttcaactgacagatttgaacctttcttttgattaaatagttttgaaaatctctttttgtagaatctgcaagtggatatttggagtgctttgaggcctatggtggaaaaggaaatatctttacataaaaactacacagaagcattctgagaaactactttgtgatgtgtgcattcatatcacatagttgaacctatcttttgatagagcacttttgaaactctctttttgtagaatctgcaagtggatatttggagccctttgcagcctatggtggaaaaggaaacatcttcacataaaaactacacagaagcattctcagaaactactttgtgatgtgtgcgttcagctcacagacttgaaacttcctcttgattgagcagtttggaaacactctttagtaaaatctgcaagtggatattcggagcactttgaggcctgttgtggagaaggaaatatcttcacataaaaactacacagacgcattccgagaaacttgtttgtgatatgtgcattcaactgacagagttgaacctttcttttgattgactagttttgaaaatctctttttgtagaatctgcaagtggatatttggagtgctttgaggcctatggtggaaaaggaaatatcttcatatgaaaactacacagaagcattctgagaaaattctttgtgatgtgtgcattcaaaccacagacttgaactgatcttttgatagagcagtttttaaagtgtctttctgtagaatctgcaagtggttacttggagacctttgtggaagatggtggaaaaggaaatatcttcccgtaaaaactacacagatgcattctgagaaacttctttgtgatgtgtgcattcatctcacagagttcaacctatcttttcgtagagcagttttgaaactctcttttcctagaatctgtaagttgatatttggagccctttgcggcctattgtggaaaaggaaataacttcacatgaaaactacacagaagctgagaaacttctttgtgatgtgtgcattaatttcccagagtcgaacctttcttttgattgagcagttttgaaacactctttttgtagaatctgcaagtggacatttgaagcactttgaggcctattgttgaaaaggaaacatcttcatataaaaacaacaaggaagcattctgagaaaccattttgtgctgtgtgcattcacctcacagagttcaactttatttgatacagcagttttgaaacactcttcttgtagaatctgcaagtggaaattgggaaatatttaggcatatggtggaaaaggaaacatccgcacataaaaactacacagacacattctgtgaaacttctttgtgctgtgtgcattcaaaccacagagttgaacctatcttttgaatgagcagttttgaaactctcttttcatagtatctgcaagtggatatttggagccttttgtggcctacggtgggaaaggaaatatcttcatataaaaactacacagaagcattctgagaaacttctcagtgatgtgagcattcttctcacagagttgaactatcttttgattgagcagttttgaaacactgttttttttagaatctgcaagtgaatatttggagccttttgggtcttattgtggaaaaggaaatatcttcacataaaaactacacagaagcattctgagaaacttctttgtcatgtgtggattcatctcacagagttaaatctttcttttgattgagcagtttgcaaacactctttttgtggtatctccaggaggatatttggagtgctttgaggcctatgttggaaaaggaagtatcttcccttaaaagctatgcagaagcattctgagaaacttccttctgatgtgtgcattcatctcacctagttgaacctttcttttggttgtgcacttttgaaacactctttttgtggaatctgcaagtggatatctggatcactttgacgtctattgtggaaaaggaaatatcttcacataaaaactacacagaagaattccgacatagttctttgtgatgtgtgcattcaactcacatagttgaaaccatctcttgatcgagtagttttgacctctcttgttgtagatctgaagtggatattgtgtccctggcgtctatgtggaaagaatatctcacaaaatactacacagagcatctgagaactctttgtgagtgtcatcatccaagagtgaacttctgtgatgagcagttgaatactcctttgtgatttgtgcactcatctcacggtgttgaaactttatttttattgagcaattttgaacattcctttttatagaatctacaagtggatatttggagtggtttgagacctatggtagaaaaagaactatcttcaccgaaaaaccacacagaagcattttgagaagcttctttttgatgtatgcattcaactcacagagacgaactgatcttttgatagagcagttttgaaactcacttttgtagaatctgcaggtggatatttggagtacattgcggcctatggtgaaaaaggaactatcttcgcatgagaaccaggcagaaacattctgagaaactagtttgtgatgtgtgcattcatctcacagagttgaaatcattttttgatttgagtagtttggaaacactctttttgtggaatctctaagggcatatttgaagcgttttgcacgctgttgtggaaaaggaaatatcttcacataaaaactacacagaagcattctgagaaacttctttgtgatgtgtgcattcatctcacaaagttgaaccgttctaatggttgagcagattggaaaaactatttttgttgaatctgcacgtggatatttggagcgctttgaggcctttggtggaaaaggaaatgtcatcacataaaaactacacagaagcattctgagaaactgctttgtgttgtgtgcattcatctcacagtgttgaacatttcttttgattgagcagttttcaaagtctctttttgtagaatctgcaagtggatatttggagtgctttgagatgtatggcggaaaaggaaatatcttcacaggaaaactacacagaaacattctgagaaactactttgtgatatgtgcattcaactcacagagttgaacctatctattgatagagcagttttgaaactctctttttgtagaatctgtaagtggatatttgtagcccattgtggcctgtggtggaaaaggaaatatcttcacataaaaactacacagaagccttctgatatacttctttgtgatgtgtgcgttcagctaatctatttgagcctttcatttcattgagtagttttgaaacactcttttttagaatctgcacgtggctgttttggaccgcttttaggcctatgatggaaaaggaaataccttcacaaaaaatctacacagaagtatcctgagaaacttctttgtgatgtgtgcattaatctcacaaaattgatcttctcttttgattgagccatttggaaatactatttttgtataatctactagtggatatttggagcgctttgaggcttactgaggaaaaggaaatatcttcacataaaaactacacagaagcattctgagaaactgctttgtggtgtgtgcattcatctcacagtgttgaacgtttcttttgattgagcagttttcaaagtctctttttgtagaatctgcaagtggatatttggagtgctttgaggtgtatggcagaaaaggaaatatcttcacaggaaaactacacagaaacactctgacaaacttctttgtgatgtgtgcattaatctcacagagttgaacctttcttttgattgattagttttgaaacaatattttagtagaatctgcaattggatattcggagcacatttagggctactgtggaaaaggaaatatcttcccataaatactacacagaagcattctcagaaacttctttgtgatgtgtgcattcacctcaaagttttgaaactttcttttgattgagcagttttgagacaaactttttataggatctgctggtgggtatttgaagcattttgaggcctatggtggaaaaggaattgttttcacataaatactacacaaatgcattctgacaaatttctttgtgatatgtgcattcaactcaccgtgttcaacctatcttttgattgagcagttttgagtctttctttttttagaatttgcaatgggatagttggaaccctttgtggcatatggtggaaaagggaatatcttcacataaaaactacacagaagtattctgagaaactcctttgtgatgtgtgcattcatctcacagggttgaacctttcttttaattcaggagttttgaaacactctgcttatagaatctgcaagtatatatttgaagccctttgaggcctattgtggaaaaggaagtatcttcacataaaaactagacagaagcattctgagaaactacttggtgatgtgtgcattcctctcacagagttgaacatttcttttgattgagcagtttggaagcactctttttgtagaatctgcaagtggatatttggagcgctttgaggcctgtggtggaaaaggaaatatcttcacataaaaactacacagaagcattctgagaaacttctttgtgctgtgtgccttcatatcacagagttgaacctatcttttgatagagtagttttgaaactgtctttttgtagaatctgcaagtggatatctggagccctttgctgcctatggtggaaatggaaatatcttcacataaaaattacccagaagcattctgagaaatttctttgtgctgtgtgcattcaaatcacatagctgaacctatcttttgatagagtaattttgaaactctctttttgtagaatccgtcagtggatatttggagccctttgccgccaaatgtggaaatggaaatatcttcacataaaaactacacagaagcattctgagaaattcctttatgatgtgtgcgttaatctgacagagttgagcctttcatttgattgagcttttttgaaacactctttttgtaggatctgcaagtggatatttggagcgatttgaggcttactgtggaacaggaaatatcttcacttaaaaactacacagaatgattctgagaaacttctttgtgtgccttcatgtcacagagttgaacctatcttttgattgaccagttttgagtctctctttttgtagaatctgcaagtggatatttggagcattttgcagactattttgaaaagaaaatatcttcacataagaactacacagaagcattctgagaaacttctttgtgatgtgtgcattcatctcacagaattgaacatttcttttgattgagcagttttggaacactcgttttatggtatctgcaagtggataattgaagctctttgagacctattgtggaataggaaatattttcacataaaaactatacagaagcactctgagaaacttatttgtgaggtgtgcattcttctcacagagctgaacctctcttttgattgagcagctttgaaatcctctacttttagaacctgcaggtggatattcagagtgctttgaggactgttatgaaaaaggaagtatctccatgtaaaaactacacataagctttgtgagaaattccttgtgatgtgtgcgttcatctcacagagttgaaatttattttgatttagcagttttgaaacaatcattttgtagaatatgaaaatggatattgggagtgcttttaggcctctggtggaaaaataaatatcttcacctaaaaactgcacagaa

SEQ ID NO: 947 - DNA, 6030 bp, Homo sapiens
  source 1..6030: mol_type = other DNA
ggaggaggagccaagatggccgaataggaacagctccggtctacagctcccagcgtgagcgacgcagaagacgggtgatttctgcatttccatctgaggtaccgggttcatctcactagggagtgccagacagtgggcgcaggccagtgtgtgtgcgcaccgtgcgcgagccgaagcagggcgaggcattgcctcacctgggaagcgcaaggggtcagggagttccctttccgagtcaaagaaaggggtgacggacgcacctggaaaatcgggtcactcccacccgaatattgcgcttttcagaccggcttaagaaacggcgcaccacgagactatatcccacacctggctcagagggtcctacgcccacggaatctcgctgattgctagcacagcagtctgagatcaaactgcaaggcggcaatgaggctgggggaggggcgcccgccattgcccaggcttgcttaggtaaacaaagcagccgggaagctcgaactgggtggagcccaccacagctcaaggaggctgcctgcctctgtaggctccacctctgggggcagggcacagacaaacaaaaagacagcagtaacctctgcagacttaagtgtccctgtctgacagctttgaagagagcagtggttctcccagcacgcagctggagatctgagaacgggcagactgcctcctcaagtgggtccctgacccctgacccccgagcagcctaactgggaggcaccccccagcaggggcacactgacacctcacacggcagggtattccaacagacctgcagctgagggtcctgtctgttagaaggaaaactaacaaccagaaaggacatctacaccgaaaacccatctgtacatcaccatcatcaaagaccaaaagtagataaaaccacaaagatggggaaaaaacagaacagaaaaactggaaactctaaaacgcagagcacctctcctcctccaaaggaacgcagttcctcaccagcaacagaacaaatctggatggagaatgattttgacgagctgagagaagaaggcttcagacgatcaaattactctgagctacgggaggacattcaaaccaaaggcaaagaagttgaaaactttgaaaaaaatttagaagaatgtataactagaataaccaatacagagaagtgcttaaaggagctgatggagctgaaaaccaaggttcgagaactacgtgaagaatgcagaagcctcaggagccgatgcgatcaactggaagaaagggtatcagcaatggaagatgaaatgaatgaaatgaagcgagaagggaagtttagagaaaaaagaataaaaagaaatgagcaaagcctccaagaaatatgggactatgtgaaaagaccaaatctacgtctgattggtgtacctgaaagtgatgtggagaatggaaccaagttggaaaacactctgcaggatattatccaggagaacttccccaatctagcaaggcaggccaacgttcagattcaggaaatacagagaacgccacaaagatactcctcgagaagagcaactccaagacacataattgtcagattcaccaaagttgaaatgaaggaaaaaatgttaagggcagccagagagaaaggtcgggttaccctcaaaggaaagcccatcagactaacagcggatctctcggcagaaaccctacaagccagaagagagtgggggccaatattcaacattcttaaagaaaagaattttcaacccagaatttcatatccagccaaactaagcttcataagtgaaggagaaataaaatactttatagacaagcaaatgctgagagattttgtcaccaccaggcctgccctaaaagagctcctgaaggaagcgctaaacatggaaaggaacaaccggtaccagccgctgcaaaatcatgccaaaatgtaaagaccatcgagaataggaagaaactgcatcaactaatgagcaaaatcaccagctaacatcataatgacaggatcaaattcacacataacaatattaactttaaatataaatggactaaattctgcaattaaaagacacagactagcaagttggataaagagtcaagacccatcagtgtgctgtattcaggaaacccatctcacgtgcagagacacacataggctcaaaataaaaggatggaggaagatctaccaagcaaatggaaaacaaaaaaaggcaggggttgcaatcctagtctctgataaaacagacttcaaaccaacaaagatcaaaagagacaaagaaggccattacataatggtaaagggatcaattcaacaagaggagctaactatcctaaatatttatgcacccaatacaggagcacccagattcataaagcaagtcctcagtgacctacaaagagacttagactcccacacattaataatgggagactttaacaccccactgtcaacattagacagatcaacgagacagaaagtcaacaaggatacccaggaattgaactcagctctgcaccaagcagacctaatagacatctacagaactctccaccccaaatcaacagaatatacatttttttcagcaccacaccacacctattccaaaattgaccacagagtgggaagtaaagctctcctcagcaaatgtaaaagaacagaaattataacaaactatctctcagaccacagtgcaatcaaactagaactcaggattaagaatctcactcaaagccactcaactacatggaaactgaacaacctgctcctgaatgactactgggtacataacgaaatgaaggcagaaataaagatgttctttgaaaccaacgagaacaatgacaccacataccagaatctctgggacgcattcaaagcagtgtgtagagggaaatttatagcactaaatgcctacaagagaaagcaggaaagatccaaaattgacaccctaacatcacaattaaaagaactagaaaagcaagagcaaacacattcaaaagctagcagaaggcaagaaataactaaaatcagagcagaactgaaggaaatagagacacaaaaaacccttcaaaaaatcaatgaatccaggagctggttttttgaaaggatcaacaaaattgatagaccgctagcaagactaataaagaaaaaaagagagaagaatcaaatagacacaataaaaattgataaaggggatatcaccaccgatcccacagaaatacaaactaccatcagagaatactacaaacacctctacgcaaataaactagaaaatctagaagaaatggatacattcctcgacacatacactctcccaagactaaaccaggaagaagttgaatctctgaatagaccaataacaggctctgaaattgtggcaataatcaatagtttaccaaccaaaaagagtccaggaccagatggattcacagccgaattctaccagaggtacaaggaggaactggtaccattccttctgaaactattccaatcaatagaaaaagagggaatcctccctaactcattttatgaggccagcatcattctgataccaaagctgggcagagacacaaccaaaaaagagaatttcagaccaatatccttgatgaacattgatgcaaaaatcctcactaaaatactggcaaaccgaatccagcagcacatcaaaaagcttatccaccatgatcaagtgggcttcatccctgggatgcaaggctggttcaatatacgcaaatcaataaatgtaatccagcatataaacagagccaaagacaaaaaccacatgattatctcaatagatgcagaaaaagcctttgacaaaattcaacaacccttcatgctaaaaactctcaataaattaggtattgatgggacgtatttcaaaataataagagctatctatgacaaacccacagccaatatcatactgaatgggcaaaaactggaagcattccctttgaaaactggcacaagacagggatgccctctctcaccgctcctattcaacatagtgttggaagttctggccagggcaatcaggcaggagaaggaaataaagggtattcaattaggaaaagaggaagtcaaattgtccctgtttgcagacgacatgattgtttgtctagaaaaccccatcgtctcagcccaaaatctccttaagctgataagcaacttcagcaaagtctcaggatacaaaatcaatgtacaaaaatcacaagcattcttatacaccaacaatagacaaacagagagccaaatcatgggtgaactcccattcacaattgcttcaaagagaataaaatacctaggaatccaacttacaagggatgtgaaggacctcttcaaggagaactacaaaccactgctcaaggaaataaaagaggacacaaacaaatggaagaacattccatgctcatgggtaggaagaatcaatatcgtgaaaatggccatactgcccaaggtaatttacagattcaatgccatccccatcaagctaccaatgactttcttcacagaattggaaaaaactactttaaagttcatgtggaaccaaaaaagagcccgcatcgccaagtcaatcctaagccaaaagaacaaagctggaggcatcacactacctgacttcaaactatactacaaggctacagtaaccaaaacagcatggtactggtaccaaaacagagatatagatcaatggaacagaacagagccctcagaaataatgccgcatatctacaactatctgatctttgacaaacctgagaaaaacaagcaatggggaaaggattccctatttaataaatggtgctgggaaaactggctagccatatgtagaaggctgaaactggatcccttccttacaccttatacaaaaatcaattcaagatggattaaagatttaaacgttagacctaaaaccataaaaaccctagaagaaaacctaggcattaccattcaggacataggcgtgggcaaggacttcatgtcaaaaacaccaaaagcaatggcaacaaaagccaaaattgacaaatgggatctaattaaactaaagagcttctgcacagcaaaagaaactaccatcagagtgaacaggcaacctacaacatgggagaaaattttcgcaacctactcatctgacaaagggctaatatccagaatctacaatgaactcaaacaaatttacaagaaaaaaacaaacaaccccatcaaaaagtgggcgaaggacatgaacagacacttctcaaaagaagacatttatgcagccaaaaaacacatgaagaaatgctcatcatcactggccatcagagaaatgcaaatcaaaaccactatgagatatcatctcacaccagttagaatggcaatcattaaaaagtcaggaaacaacaggtgctggagaggatgcggagaaataggaacacttttacactgttggtgggactgtaaactagttcaaccattgtggaaatcagtgtggcgattcctcagggatctagaactagaaataccatttgacccagccatcccattactgggtatatacccaaatgagtataaatcatgctgctataaagacacatgcacacgtatgtttattgcggcactattcacaatagcaaagacttggaaccaactcaaatgtccaacaatgatagactggattaagaaaatgtggcacatatacaccatggaatactatgcagccataaaaaatgatgagttcatatcctttgtagggacatggatgaaattggaaaccatcattctcagtaaactatcgcaagaacaaaaaaccaaacaccgcatattctcactcatagctgggaattgaacaatgagatcacatggacacaggaaggggaatatcacactctggggactgtggtggggtcgggggagtggggagggatagcattgggagatatacctaatgctagatgacacattagtgggtgcagcgcaccagcatggcacatgtatacatatgtaactaacctgcacaatgtgcacatgtaccctaaaacttagagtataataaaaaaaaataa

SEQ ID NO: 948 - DNA, 1516 bp, Homo sapiens
  source 1..1516: mol_type = other DNA
actactttaaagttcatatggaatgaaaaaagagactacatcgccaagtcaatcctaagccaaaagaacaaagccggaggcatcacactaccagccttcaaactatactacaaggctacagaaaccaaaacagcatggtactggtaccaaaacagagatatagatcaacggaacagagcagagccctcagaaataacgccgcatatctacagctatctgatctttgacaaacctgagaaaaacaagcaacggggaaaggattccctatttaataaatggtgctgggaaaactggctagccatatgtagaaagctgaaactggatcccttccttacaccttatacaaaaatcaattcaagatggattgaagacttagatgttagacctaaaaccataaaaaccctagaagaaaacctaggcattaccattcaggacataagcatgggcaaggacttcatgtctaaaacaccaaaagcaatggcaacaaaagacaaaattgacaaatgtgatctaattaaactaaagagcttctgcacagcaaaagaaactaacatcagagtgaacaggcaacctacaaaatgggagaaaatcttcgcaacctactcatctgacaaaggtctaatatccagaatctacaataaactcaacaaatgtacaagaaaaaaacaaacaaccccatccaaaagtgggcgaaggacatgaacagacacttctcagaagaagacatttatacagccaaaaaatacataaaaaatgctcatcatcactagccatcagagaaatgcaaatcaaaaccacaatgagataccatctcacaccagttagaatggcaatcattgaaaagtcaggaaacaacaggtgctggagaggatgtggagaaataggaacacttttacactgttggggggactgtaaactagttcaacccttgtggaagtcagtgtggtgattcctcagggatctagaactagaaatatcatttgacccagccatcccattactgggtatgtacccaaaggactataaatcatgctgctataaagacacatgcacacgtatgtttattgtggcattattcacaataggaaagacttggaaccaacccaaatgtccaacaatgatagactggattaagaaaatgtggcacatatacaccatggaatactatgcagccataaaaaatgatgagttcatgtcctttgtagagacatgggtgaaattggaaatcatcattctcagtaaactatcacaagaacaaaaaacaaacatcgcatattctcactcataggtgggaattgaacaatgagatcacatggacacaggaaggggaacatcacactctggggactgttgtggggtgtggggagtggggagggataacattgggagatagacctaatgctagatgacgagttagtgggtgcagtgcaccagcatggcacatgtatacatatgtaactaacctacacaatgtgcacatgtaccctaaaacttaaagtataataataaaaaaaga

SEQ ID NO: 949 - DNA, 312 bp, Homo sapiens
  source 1..312: mol_type = other DNA
ggctgggcgtagtggctcatgcctgtaatcccaacactttgggatgtcgaggcaggtggatcacctgaggtcaggagttcaagaccagcctggccaacatggtgaaaccccgtctcaactaaaactacaaaaaaattggctgggtgtggtggcgggcacctgtaatcccagctacttcaggaggctgaggcaggagaatcgcttgaacccgggagacggaggttgcagtgagccgagatcgcaacattgaactccagcctgggcaacaagagcaaaactctctcaaaaaaagagaaaaagaaaaagaaaaaa

SEQ ID NO: 950 - DNA, 303 bp, Homo sapiens
  source 1..303: mol_type = other DNA
ggctgggcgcggtggctcatgcctgtaattccagcactttaggaggtgaggtgggtggatcacttgaggccaggagttcaaaaccagcctggccaacatggtgaaacccccgtctctactaaaaatacaaaaattagctaggtgtggtgatgcacgcctgtagtcccagctactcgagaggctgaggcagaagaatctcttgaacctggaaggcagaggtggcagtgaggcgagagggtcacgccactgcactccagcctgcgtgacagagcaagactccatctcaaaaaaaaaaaaaaaaaa

SEQ ID NO: 951 - DNA, 1095 bp, Homo sapiens
  source 1..1095: mol_type = other DNA
gttgcgggaagtcagggaccccgaacggagggaccggctggagccacggcagaggaacataaattgtgaagatttcatggacatttatcagttcccaaataatacttttataatttcttatgcctgtctttactttaatctcttaatcctgttatcttcgtaagctgaggatgtacatcacctcaggaccactgtgataattgtgttaactgtacaagttgattgtaaaacatctgtgtttgaacaatatgaaatcagtgcaccttgaataagaacagaataacagcaatttttagggaacaaaggaagacaaccataaggtctgactgcctgtggggttgggcaaaaacagccatatttttcttcttgcagagagcctataaatggatgtgcaagtaggagagatattgctaaattcttttactagcaaggaatataaatattaataccctgggaaaggaatgcattcctgtggggaggtctataaacagccgctctgggaatgtctgtcttacgcggttgagataaggactgagatacgccctggtctcctgcagtaccctcaggcttactagggtggggaaaaactccgccctggtaaatttgtggtcacaccagttctctgctcttgaaccctgttttctgttatttaagatgtttattaagacaatatgtgcactgctgaacatagacccttatcagtagctctgcttttgccctttgccttgtgatctttgttggactcttataagtagttctgcttttgccctttgtcctgttccctcagaagcatgtgatctttgttagacccttactagtagtaaggtctttttgccttttgaagcatgtgatctttgtacttttgtacctactccctgttcttacaccccctccccttttgaaacccttaataaaaacttgctggtctgagactcaggcgggcatcatggtcctaccgatatgtgatgtcacccccggtggctcagctgtaaaattcctctctttatactgtctctctttatttctcagctggccaacacttatggaaaatagaaagaacctacgttgaaatattgggggcgggttcccccaata

SEQ ID NO: 952 - DNA, 488 bp, Homo sapiens
  source 1..488: mol_type = other DNA
acccatgttcattgtggccttatttacaagagtcaaaaggcagaagcaacctaaaggtcaattgacagatgaatggataatacatttagaaaatatgatacacaggtacaaaagagtattattattctgtttttacaaattagggaattctgatacatgccacaacatagatgaatcttgaagacattatgttaattgaaataagcagtcacaaaaagacaaatactgtatgattccatttattatgaggtacctaggaaagtcaaatttatagaaacagaaagaatggcagttgccaggggctgggagtaggaagaaatggacagttgttgttcagtgggtataaagtttcagttttgcaagatgaaaaagttccagagatcggccgcacaacaatgtgaaaacagttaacactactgaactatatacttaaaacccgttaaggtgataaattttgtgttatacgtattttacaacagttaaacaaa

SEQ ID NO: 953 - DNA, 315 bp, Homo sapiens
  source 1..315: mol_type = other DNA
ggctgagcacggtggctcacacctgtagtctcagcactttgggaggccgaggcaggaggatgacctgaggtcaggagtccaagaccaccctggccaacgtggtgaaaccctgtctctgctaaaaacacaaaaattagccgggcgtggtggcgtgcacctgtaattccagttactcagggagctgagacaggagaatcacttgaacccgggaggtggaggttgcagtgagctgagactgcgccactacactccagcctgggcgacaagagtgaaattccatctaatacaaacaaacaaaaaaaacaaaaaaacaaa

SEQ ID NO: 954 - DNA, 193 bp, Homo sapiens
  source 1..193: mol_type = other DNA
ggcagcataatagagtataaagaactctcaacttcgagtcagaagatctgaatctttttggctttgccactaattttctctgtgactttgagcaaatgagagtttttctgggcttcggttttctcatctgtaaaatgagaggtagaactacactgcttctaaagccagtccttgcttagatgtaaaattctgt

SEQ ID NO: 955 - DNA, 343 bp, Homo sapiens
  source 1..343: mol_type = other DNA
tgatatggtttggatgtatccccacccaagtctcatcttgaattttaatcctcataattcccaggtgttgtggtaggtaattgaatcatgggggcagtttccctcatgctattctcatgatagtgagctttcatgagatctgatggttttataagtgcctggcatttcccctactggctctcattctcactcttgccgccctgtgaagaggtgccttccaccgtgattgttaagtttcctgaggccttcccagccatgtggaactgtgagtcgaaaattaaacctcttttataattacccagtctcgggtatttcttcatagcagtgtgagaatggattaata

SEQ ID NO: 956 - DNA, 29 bp, Homo sapiens
  source 1..29: mol_type = other DNA
tccttcatttgcaggacatcaagggctcc

SEQ ID NO: 957 - DNA, 149 bp, Homo sapiens
  source 1..149: mol_type = other DNA
caggtgcaatggcacatgcctgtagtcccagctactcaggaagctcctttgagcccaggagttcaaagctgtctgctgcactccagcctggcaacatataacacccttgtgtctctaaaaaaaaattttttttaattaaaaaaaaaaag

SEQ ID NO: 958 - DNA, 2448 bp, Homo sapiens
  source 1..2448: mol_type = other DNA
catacattgttatatcatgcttttctttatgctttgtggatattgctcttgttacaaattgaaagtttgtggcaaccttgaatcaagcaagtctgttggcatcatttttttccagcagcatgtgctcacatcatgactgtgtcacatttcaataattctcacaatattttaaactttttattattattataagtatggtttatgagaccccaaaacaattacaactgtaacattaaagatccctgatcacagatcaccatagcagttataaaaatgaaaagatttgaaatgtcatgagaattaccaaaataagttacagagacatgaaatgagcatataccatcttatatataataataatgtacacaataagatggtaaacttaagtgataaatgttttgtgtgttctgactgctcaactggctcaactgaccagctattctcaaattctctcctccttgaggctctctattgcctgagacacagcaatattgaaattaggtcatttagtaaccccacaatgacctatgtgtgttcaagggaaaggaagagtcacaggttcaagtgttcaagagtcacttgagatcaaaagctagaaatgattaagcttagtgaggaaggaatgttgaaagctgagataagccaaaggccaggccttttgtgccctgtgaatccaagagttatgaatgcaaaggaaaatatttttaaagaaattaaaagtactactctagtgaacatatgaatggtaaggaagcaaaacagtcttattgctgatatggagaaagtttgagtagtctaatagaagatcaaaccagccacaacattctcttatgccgcagcttaatccagaacaaggccttaactctcttcaattctgtgaaagctcagagaagtgaggaagcttcagaagaaaagatcaaatctagcagaagccagttcatgatgtttaagaaaataagttgtcttcacaatataaagtgcaaagtgaaacagcaagtgctgatatagaagctgtagacaattatccagaagatctagctaaggtaaattgttgaaagctgctacactaaacaacagatttccaatgtaaacaaaacagccttctgttggaagaagataccatctaagatgttcctagagaacagaaatcaatgcctggctttaaagcttcaaaggacagcttcaaactctcttgttaggggataatgcagctggctactttaagttgaagccagtgctcacttaccattttaaaaatcctgggacccttaagaattatactaaatcaatcctgctgtactctataaatggaaccacaaagtctgaatggcagcacattcatttgcatcatggtttactgaatattttaagcctacagttgtgacctactgctgagaaaaaaaatgattcttttcaaaatattactgctcattgacaataaacctggtcacccaagatctctgatgtagatgtgtaaggagattaatgttgttttcatgcttgctaacacaacatcaatagcccatggatcaatagtaatttcaactttcaagccttcctatttaagaaatacttttcataatgctatggctgccatacatagtgattcctatgatgaatctggacacagtaaattagaaactttctagaaaagattcaccattccagatgtcaataagaacatttgtgattcataggaggagaagtttgtttcaaaatgagtttgaagcattcaagatgtcagtagggaagtcaatgccgatgcggcagaaatagcaagagaactagaattggaaatggagctcaaggatgtaactgaactgctgtaacctcatgataaaacttgaacagatgagttgcttcttatggataaggaaataaagtgtttttttctgagatggaatctacttctggtgaagaggttgtgaatattgttaaatgacatcaaaggatttagaatattatataaagttagttgataaagcagcaacagagtttgaaaatactccagttttggaagaagttctattgtgggtaaaatgctatcaaaaagcatcacatgctacagagaaatcttttatgaaaggaagagtcaattgatgtggcaaacttcatcattgccttattttaagaaattgatacagcaacctcaaacctcagcaaccaccaccctaagcagttatagacacagaggtgagaccctccaccagcaaaaatattacagtttgctgaaggttcaaataatcgttagtattttttagcagtaaagtatttttatattaagatacatacatttattttacactgaatgtttttgtacatttaatagacaacagaatagtgtaaacataacttttatatgtactgagaaactgaaaaaaatcttggcaatattttctttattgtggtggtctggaactgaacatgcgatatcttcaagttatgctt

SEQ ID NO: 959 - DNA, 88 bp, Homo sapiens
  source 1..88: mol_type = other DNA
agggttgttttgagggtcaaataaattgatggatgttaacgctctctgtaaattataaagcactatacaaatacaaggcattattgtt

SEQ ID NO: 960 - DNA, 61 bp, Homo sapiens
  source 1..61: mol_type = other DNA
gctgggcgcggtgggtcacgcctgtaatcccagcactttgggaagcctaggcaggtggatc

SEQ ID NO: 961 - DNA, 309 bp, Homo sapiens
  source 1..309: mol_type = other DNA
ggccaggcgcggtggctcacgcctgtaatctcagcactttgggaggccaaggcaggtggatcacctgaggttaggaattcgagaccagcctgaccaacgtggtgaaaccctgtctctactaaaaatacaaaagttagccaggcatggtggcatgcacctgtagtcccagctacccaggaggctgagacaggagaattgcttgaacccaggaggcagaggttgcagtgagctgagattgtgccactgcactgcagcctgggcgacagagcaagactatcacaaaacaacaataacaaaaacaaaaaacaa

SEQ ID NO: 962 - DNA, 1420 bp, Homo sapiens
  source 1..1420: mol_type = other DNA
cattttttcttttcattatttcctatcctcattcttgctggaactcatctagtcagactcttgttctcccctcaccaccaaagctgctcttatcagagtcacaaaagctcttcttgatgatagattcagtgcattttctcagtcctcatcttactgaatgtctctggcatttgacacagttgtctgctcttcatgggacactttcttctcttggcttcttttccttgaacctttccagctgctccatcatggtctgtggacacagaccttggctatttctatatgtttctctgttcccccttccatttttgtactgatgatgaagataatgataactcatatattgagcatgtattacatgtattaatacacataaaccttttacatgttttgactcattgagtcctcacaacacccctcttctgtgaggtaggtattgcttattcccttttcacatactttcccagtgtaacacggctactcagcgggagagccagagccagtcccagggagtcattctgtctgcaaacctctgccctgcctcgccttctgctgactctcaggtgtcctctctctccagcctgggcccctaccctgagctctagatgctgatgatacacaactactgcctgacatccaaatcactggcaggcaccttacatttaaatcatttgaactggagcagctagctcaggccacaaatccaagtcacctttagtttctctttttcttcacatcccatgatcagatcatcagtagatcctgtttgctctccctgtaaaacatatcctgactccatctcttttcaccacctttgctgctaataacctggtccaagccaccacagtgctggacagtgctgtgacagcctcatgaccattcttcttatttccatagttcctcctgagtcccacagagaataatgtttttaaaacatatcccagctctaaaccatccagcagtttccattagaataatatccccagaccttaccatggtctataaggccatctgtactccatttgctacctgattacatctgatgcatctcctacccgtctccctactctgccattccatccacacaagttttcttgcttttcctgaaatatgtggtgcccctttccatttcaggaccttggcacttgctgttactatgaatttgagtagaataacccctgccaaagacctctgcctgcttaacctactcagtctagaagtctgtctcccattcttctccctggtagtctctaaccctatctttatctttcttcatactagtactcgccactaaaatccatctatattttgtttactctttatcatctctgtctcctttgtcaatggaacccttgtcttattgaccactagcatttggcacatagtaggagcacaaaaggtatttgctgagtggatggat

SEQ ID NO: 963 - DNA, 293 bp, Homo sapiens
  source 1..293: mol_type = other DNA
cgggtgtggtggctcacgcctgtaatcccagcacattgggaggccaaggcaggtggatcacctgaggtcagaagtttgagaccagcctggccaacatggtgaaaccccgtctctactaaaaatacaaaaagtagccaggcgtggtggcgtgtgcctgtagtcccagctacttgggaggctgaggcaggagaatagcttgaacctgggaggtggaggctgcagtgagttgagactgcaccattgcactccagcctgggtgacaaagcaggactccgtctcaaaaaaaaagaaaa

SEQ ID NO: 964 - DNA, 119 bp, Homo sapiens
  source 1..119: mol_type = other DNA
gatgtgggttcgaatctctgccccgccaacttgtgatcgtatcgactcggcccagacgcaattttcttctctgcaaaatcgtcataagaataatcacttgtcagggtagctgcgggcat

SEQ ID NO: 965 - DNA, 299 bp, Homo sapiens
  source 1..299: mol_type = other DNA
ggccaggcgcagtggctcacgcctgtaatcccagcactgggaggccgaggggggcggatcgtgaagtcaggagatcgagaccatcctggctaacatggtgaaaccctgtctctactaaaaatacaaaaaaaattagccagccatggtggcgggcgcctgtaatcccagctacttgggaggctgaggcaggagaatggcatgaacctgggaggcagagcttgcagtgagctgagattgcgccactgcactccagcctgggcaacagagcgagactccgtctcaaaaaaaaaaaaaaaaaa

SEQ ID NO: 966 - DNA, 292 bp, Homo sapiens
  source 1..292: mol_type = other DNA
gctgggcacaatggctcatgcctgtaatcccagcactttgggaggccgacaagggcgggtcacttgaggtcaggagttcgagaccagcctgaccaacatggtgaaaccccatctctactaaaaaatacaaaaattagccaggcatggtgatgcacatctgtaatcctagctactcgggagactgaggcaggagaatctcttgaacctgggaggtggaggttgcagtgagccgagattgtaccacctcactccagcctgggtgacagagcaaaactctcaaaaaaaagtaaaa

SEQ ID NO: 967 - DNA, 68 bp, Homo sapiens
  source 1..68: mol_type = other DNA
agtgattatgaagtgttcttcccagactagctttatcgtcatctgggaaattgttaaaaatgcaaatt

SEQ ID NO: 968 - DNA, 298 bp, Homo sapiens
  source 1..298: mol_type = other DNA
ccaggcgcaatggctcacgcttgtaatcccagcactttgggaggccaagatgggaagatcctttgagcccaggagtcagagacaagcctggacaacacagggagaccccttctctacaaataaaatttacaaattagccgggcctggtggcgcgcacctgtggtcccatctactcaggtggctgaggcaggagaatcgctggaacccggaaggcggaggttgccgtgagcggagatagcaccaccgcactccagcctgggtgacacagcaagactccgtctcaaaaaaaaaaaaaaaa

SEQ ID NO: 969 - DNA, 298 bp, Homo sapiens
  source 1..298: mol_type = other DNA
ggccgggcgcggtggctcacgcctgtaatcccagcactttgggaggccaaggcgggcggatcacgaggtcaggagatcgaaaccatcctggctaacacggtgaaaccccgtctctactaaaaatacaaaaaattagccgggcgcggtggcaggcgcctgtagtcccagctacttgggaggctgaggcaggagaatggcgtaaacctgggaggcggagcttgcagtgagccgagatcgcaccactgcactccagcctgggcgacagagcgagactccgtctcaaaaaaaaaaaaaagaa

SEQ ID NO: 970 - DNA, 288 bp, Homo sapiens
  source 1..288: mol_type = other DNA
ggccgggcgtggtggctcacacctgtaatcccagcactttgggaggctgaggcgggcagatcacttgaggccaggagttccagaccagcctggccaacatggcaaaacctcacctctactaaaaattaaaaaattagccaggcatggaggcatgtgcctgtaatcccagctacttgggaggctgaggcagaagaattgcttgaacccaggaggcagagattgcagtgagccgagatggcgccactgcactccagcctgggcaatagagtgtgactctcaaaaaaacaa

SEQ ID NO: 971 - DNA, 136 bp, Homo sapiens
  source 1..136: mol_type = other DNA
gtttccttattggtaaaacagggatagcatttctacatctagaattgttggaattaaatgagaaccatgaaaaaagagaaccaaaactcttaccacagtgtctgagtatatgtctatgataaactcaataaatggt

SEQ ID NO: 972 - DNA, 99 bp, Homo sapiens
  source 1..99: mol_type = other DNA
tgactccatcccaagaacattgtgaggttcaaatgacattatgtgagtgaaggtgctctgaaaatttgccaagttccacagaaatcccagatatcatta

SEQ ID NO: 973 - DNA, 522 bp, Homo sapiens
  source 1..522: mol_type = other DNA
gtgatggtcaattttctgcatcaacttgactgggctaagggatgctcagatggcaggtaaaatcattgtgcttgtgagggtgtttccagaagagatttgcctttgaatcagaagacagcaaagatttccttcagcaatgaaggaggcatccaccaaactgtcagggcccagagagaagaaaaagacaggaagggtgaatttgacctctctgactgggacatccatctctgcctatcctgggacctccacactcctggttctctggccttcagacttgatcagggactaacaccatcgcctcccacccccacctttgttctgaggcctttagcctctgaatgataccactggctttcctgcttctctatcctgcagtcggcagatcatgggacttcttcactccaaaattgtgtgagccaattcccataacagatagataaatttataaataaacacacaaatttcctacagccttatcttagtggtgtcacttcaaattttgaagaaccctgacctagtaca

SEQ ID NO: 974 - DNA, 256 bp, Homo sapiens
  source 1..256: mol_type = other DNA
actgggtgaggataacacaagtaaaactgtggtactgatggacttaaccggagttcggaaaccgtcctgtgtacacatgggagtttagtgtgataaaggcagtatttcagactggtgggctagccaatagagttgggacaattgcttactcattaaaaataatagagccccacttgacactattcactaaaattaatctggaatttaaggcccaacattaaacacaaagctgttgaaatattgatgaaaatgtaag

SEQ ID NO: 975 - DNA, 124 bp, Homo sapiens
  source 1..124: mol_type = other DNA
tgggcatggtggtgtgggcctatagtcctagctactcaggaggtgggaagattgtttgagcccagcagtttgcagccagcctggcaaacatagtgagaccctgtctctttaaaaagagagagaa

SEQ ID NO: 976 - DNA, 99 bp, Homo sapiens
  source 1..99: mol_type = other DNA
gattctctgggacattcctaaatttatatattctgtcccattgtctgtcctagcatattgtgtgcagagatttttctgtttagaaattatggtcagcat

SEQ ID NO: 977 - DNA, 290 bp, Homo sapiens
  source 1..290: mol_type = other DNA
gccaggcacggtggctcacgcctgtaatcccagcactttgagaggcctaggcggatggatcacttgaggtcaggagttcaagaccagcctggccaacatggcgaaaccctatctcttagccgggtgtggtggcgggcacctgtcatcccagttactcaggtggctgaggcacgagaatcacttgaacctgggaggcggaggttgcagtgagctgggatcatgccactgcactccagcctgggtgatggagtgagactctgtcttaaaaacaaacaaacaaacaaaaaaac

SEQ ID NO: 978 - DNA, 133 bp, Homo sapiens
  source 1..133: mol_type = other DNA
cagtgttttttcaaccctgactaaacattacaataatctggggaggttttacaaaataatgttttgtaaatttggtcccatcgcagaccaaatatatcagaatctcttagggtgaggcccaggctccaaaatt

SEQ ID NO: 979 - DNA, 227 bp, Homo sapiens
  source 1..227: mol_type = other DNA
ccttccatcttttgcttaggttttctcttcctgggctactcatcccctcaacacatacatccacactgggcatcctccacaggacttccaaaataccctggacctctctttgtactcaccccattccattaccatgatctgttttggaatctgtttctcccatttatttgtgagcccttggcagataggggtggcacatctgtgtgttgtgcacatctgtgtacata

SEQ ID NO: 980 - DNA, 222 bp, Homo sapiens
  source 1..222: mol_type = other DNA
ctgcctttgagttgttccgtgatcacttctgaataagcagtttgcctttataaaaacttgctgcctgactaaagattaacaggttatagtttaaatttgtaattaattctaccatcttgcaataaagtgacaattgaatgaaacagggtttttcaagttgtataattctctgaaatactcagcttttgtcatatgggtaaaaattaaagatgtcattgaact

SEQ ID NO: 981 - DNA, 198 bp, Homo sapiens
  source 1..198: mol_type = other DNA
tggtatgagcactagacttggagttaagatttgagagccccctctgtcactgtggaagcttgagcatgttgcttgatctctctgaaccttgtgtttctcatctgtgaaaggtgataatgtggggctgctgtgagatttaaaggacataatgcacctacggtccaagcactgcctggaatacagcagaagctcagcaga

SEQ ID NO: 982 - DNA, 310 bp, Homo sapiens
  source 1..310: mol_type = other DNA
ggctgggcgcggtggctcacatctgtaatcccagcactttgggaagccgaggtgaacagatcacctgaagtcaggagttgaagaccaacttggccaacatggtgaaaccccatctctactaaaaatacaaaaattagccaggcatggtggtggacccctgtaatcccagctacttggaaggctgagggggaggattgcttaaacccaggaggcagaggttgcagtgagccgtgattgcaccactgcactccagcccaggtgacacagcaagactccgtctcaaaaaaaaaaaaaagaaaagaaaaaaaaa

SEQ ID NO: 983 - DNA, 346 bp, Homo sapiens
  source 1..346: mol_type = other DNA
tgctgtggtgtgcatgtttgtgtttcccccaaaattctaatcaccaatgtgatgttacgaggtagggtctttgggaggtgatcaggtcatgagggcagtgccctcagggatgtgatgaatgcccttatgagagaccccagagagctgcttgccacttctaccgtgggaggacaccacgagaaggcgccgtctgtgaaccagaaagcagaccctcaccagacaccaaatttgttggtaccttggtcatagacttcccagcctccagaactgttaaaaataaatttatactgtttataatctacgcagtttgtgatattttgttatagcagtccaaatggaccaagac

SEQ ID NO: 984 - DNA, 561 bp, Homo sapiens
  source 1..561: mol_type = other DNA
tgctctcaactactcacactccctggggagattcctacacttccttgattataaccactacctggggactccctaatactaggctgtaaccttgactttggcctgagttctcagcttctgactcgtggagctggttgcctctggaccacaggaatctcaaacgcatcatatccaaatccaaatgtcatggtcagtccctccaacccctcctcctcttgtcttacatcctatctcagagatagtcctagaagccaggccattgatttggggatcctagactcatccctcttcccagccttcattcccccttctgtcagtcaccaaatttctgctaattttacattctaagtattagcgaatcttgccgctcttcttctgtatctctacccactgccttgctcaggcctttgttatcttttaactggacaattgcaagggccttcttctaactggtctccctgcctacagtcttgcctccagcaaatccatcctccaatcctgatgccagagtgatctgaaatgcaaatatgatcttgccactcccctgcttaaaacccacca

SEQ ID NO: 985 - DNA, 1594 bp, Homo sapiens
  source 1..1594: mol_type = other DNA
cagtagacttaggtgcacatgacctattgagacaccagctgggtggccagggagtgcatttttgccacccttactgcaaagccaggcagtgttgttcacagcccaggaagagacagaagagtaaaaaggactttgtcttgcaacttggataccagctcagccagagtagaacaagggaccagagtcctgaggcccccattccaggacctagcttatggatgacatttctagacacaccttggaccaaaatgcaaccagcacatttgaagggaaggatccagtcctggcaggagtcatcacctgctgaccaaagagcccttgggctctgtataatcaacagtggtagccaggcagtactcactgtgggcattgggtgagactcagagccatgctggcctcaggagggacccagtatattcccagctgtggtggctacagggagagactctttctgcttgaggaaaagagagggaagagtaaaggggactctgtcttacaggcagggtacaagctcaaccacagtggggtagaacaccaagtgtgctcttgaggtccctgattctaggccttggctcctggatggtatttctggacgcactctgggccagaggggagcccgttgccctgaagggagatacccaggcctatcagcattgaccacaagctgaccaaagagcccttggaccttgagtgaatatcagcaacagccttgcagtacttgctgcaggcctggggcagcggtggccatggggagagattcctctgcttgaggaaacgggagagaagaatgagaaggagtttgtcttttggtttgggtgtgagctcagctgctgtagaatagaatgacaggaagattcctaaggttctcaacgccaggccctgatagcgtctctggatctgcccagagctagggtaactggctgccctaaaaggaaggacataagcctggctggatttgccacctgctgattgtagtgcccttgggctttgagtaaacataggtggtagacaggcaagtggtcaccatgtggaccttgggcaagacccagtgctgtgctggcttcagacctgacccaggccagtcccagtattaatggccacaggggtgctgtgtcactcctcctggctccaagcagctcagcacagagagaaagagactccatttgtttgggagaaagttagggaagagaacaagagtctctccctggtaatccagagaattctcccagatctgacccaagaccaccaaggcagtaacctctacaagtctgcaggagccacaacattactgggcttagggtgccccctaatgcagatacagctgcagtgaccaaagacttagatcacaatgcccaattcccctcaaatacttggaaagccttcccaagaaggacaggtacaaagaagcccagactgtgaagactacaataaacatctaaccattcaatgcacagacactaatgaacatccacaagcatcaagaccatcgaagaaaacatgacctcaccaatatctaataagataccagtgaccaattccagagagacagaaatatacaaccttagagacagaaaattcaaaatagctattttta

SEQ ID NO: 986 - DNA, 304 bp, Homo sapiens
  source 1..304: mol_type = other DNA
ccaggcacagtggcttatgcctgtaatcccagcagtttgggaggccaagggacaggtggatcagttgagctaaggagttcaaaaccagcctgggcaacatggcaaaacctcgtctttacaaaaattagctgggtgcaatggcatgtgcctgtagtcccagctacttggaaggctgaggcaggaggatcacttgagcctaggaggtggagtttgcagtgagccgagattgtaccattgcacttcaacctgagcaatgacagtgaaaccctgtctcaaaaaaaaaaaaaaaaaaaaaaaaaaaaaa

SEQ ID NO: 987 - DNA, 250 bp, Homo sapiens
  source 1..250: mol_type = other DNA
aagaacattaactctggagctggactattgggttcaaaacctgactgacaactttctataaaaaagctgacactttcagctataaaactctggcaagttatgttatttaactggtgtctgttacatgtccacatatgagaaaaacagtaaccgcctcctgaggtttttgtgaggaccaaataatttttattcacatacatctagttcatctacctaaagtgttcagaacaatgttcagcacatattaagc

SEQ ID NO: 988 - DNA, 158 bp, Homo sapiens
  source 1..158: mol_type = other DNA
aattagccgggcatggtggcccgtgcctgtagtcccagctacttgagaggctgaggcaggagaatcacttcaacccaggaggtggaggttacagtgagcagagatcgtgccactgcactccagcctgggtgacaagagagacttgtctccaaaaaaaa

SEQ ID NO: 989 - DNA, 48 bp, Homo sapiens
  source 1..48: mol_type = other DNA
aaggaaaaactgcttagtgaagaacttagaagctgtggagaccttggg

SEQ ID NO: 990 - DNA, 955 bp, Homo sapiens
  source 1..955: mol_type = other DNA
ttctagagcattagccctactttttttctaaaaatggccagccttggagctcatgcctttcagctatacagcttgctattcctccatggttcagccatctactgagccccaaattgttccccttcgttccttgaagattatagcattgagcttgctgtgactctggtacaactccttatcaatcttgggataactcattgtctacacagacttcttagttctgtgatcatttccccagtgttattttttccctacttagccttacataccctagatcttgattccaactgcaccctctgcatagtctcaatttcaggcatcctgcaaccacaacctcccacctttccagctcacccactgtaataacctgactactaattctacctctttggaacccacaatgcagtgattctgccaccttcctgttgtttctctcacccacctcaggtccttcccttcatccttcccagcttagattctatagaccatcactatagtcactctattgcatagtctccctctcattcttgcctggcaaaactccaacccaggttagatccaaccttccatctaacccaactgaatgatcctgcagaaaaaacaaaagcgtgatgactagtctcactttaaatgtatgaccactaacttcagtgggctcttagcattgcccaataacctgaaacatctccccagtccatttattctcccatgcttctagacaattcatactttcttcccctcaaactccaatttctaccccacctctactctgcacttatgaccttgcttcctgtttcaccaagaatataaaaggattcagagaatttccctagcatccctaccacatgtacacatctacctaaattcctatcaagagccaactcctgtcccatgtactaaatcccattctatagccactgcccaaaaacattgcgtcagtaatttccccctctcc

SEQ ID NO: 991 - DNA, 322 bp, Homo sapiens
  source 1..322: mol_type = other DNA
cagtccctgcctgtttttgtgctctttgttcatctgggcctcatttatgctgttgttacagaatacacttccctcctctgcccatggctacctcctgtttgaccttcaggtctcagctgtactttctgtagaaatccttccctgaccaatcctgcagctagtagctgttctagcattgtaaccccttaagattctgtagtcttatatcattgttatgtttttattttaattgcatgtttaattttcttccttatacatgagccagcaagatccatgagggctagaatatagcagtcttgctcacaattatattcccactacc

SEQ ID NO: 992 - DNA, 54 bp, Homo sapiens
  source 1..54: mol_type = other DNA
tgaggacgctgttctgggtaatttttacagtcctttttagctctaagatccatg

SEQ ID NO: 993 - DNA, 319 bp, Homo sapiens
  source 1..319: mol_type = other DNA
gccaggcacagtggctcaagcctggaatcccagcactttcggaggccaagggaggtggatcatgaggtcaggagttcaagacaagcctggccaagatggtgaaatcccatctctactaaaaatacaaaaattagctgggcatggtggtgcgtgcctgtaatcccagctactggggaggctgaggcaggtgaatggcttgaacccaggagttggaggttgcagtgagctgagatcatgccactgcactccaacctgggagacagagcaagactccatctcaaaaacaaaacaaaacaaaacaaaacaaaacaaaacaaaa

SEQ ID NO: 994 - DNA, 642 bp, Homo sapiens
  source 1..642: mol_type = other DNA
ctccactaattctagacagcatcatctttttcaggacttctcaaaggcctggtttccctgcatcatgaccaatgtattttctaaagagccgccaggatgatcttaacatgtaaagtagaatgcgccactcgcttgttcaaatcctttgatgaattattttgcatttaggataaaattctaacacctaccagtgttttctgcctatctctttaggctctaaccatgaaatatcactagctccagccactctgggcttttttcatttctcaaaatgatcacattctttccctcctcagtggctagcacacgttattccttgtgcctgggatagtcttatcctcactctccccaactcctactcattgtctatatggaaaatgttactttctcaaagagaccttacttgcttgtcactaaacacaattagttctgcctattaatatgctctccagatacattctatgtttcctgcaaggcatttagtacagttcaaaattttatggagaattatattgtctatgcctgtgtttctcactagactgtcagtgccatgaagaaatggggggtagctgtttacctcatcactgaatccccagcatgaaacacaatcccaagcttaaataaatattcgttaaatgaatg

SEQ ID NO: 995 - DNA, 1234 bp, Homo sapiens
  source 1..1234: mol_type = other DNA
tcaacaaatggtcctgggacaactaaatatccacatgtaaaagaatcaagttagactccctcctcgcacataaaaattaactcaaaatggatcggagacctaaaggtaggtggtaaaattataaatcacttagaaatagtaaatctttgtaatgtgggataagcaaagttttcacaaatatgactgaaagcacaagcaacaaaagaaaaaataaattgtattccatcaagttaaaaacatttgggctgaaaagtatatcatcaagaatgtgaaaagacagtatatagaatgacagaaaatatctgcaaatcatattatctgataagagacttgtatttaggatatattttttaaaaactattacagttcaatattaaaaagataaaccaattataaagtaggtaaaggatctgaacagacattctccaaagaagatacataatgactaataagtatatgaaaagatgttgaaaatcatcaaccatcagggaaatgtaaatcaaaaccacaatgagataaacacttcacattacagacgaatataataaaaaagacagacaataacaactgttgatgaggatgtggagaaactggaattctcatacactgctggttggaatgtaaaataatgtacccacttcagaacagtctgacagttcctgaaaaggttaaacagcattaccatctgacgcagcaattctgctcctaggtatatatccaagaaatatgaagataaatgtctaccaaaaaattatacaagaatgttcataacagaattattgataatactcaaaaagtagaagcaactcaaatgtcaatcaactgatgatggataaataaaatgataaaatgtggtaaatccatatgataaaatattattcagccataaaaaggcacagagtactgataaatgctaccacatcaatgaactttgaaaacctcatgctaagtgaaagaagctgtcataaattactacatgctgcatgtttccatttgtatgaaatgtccagaagaggcaaataaagacagaaagtagactagtagttgcctagggctgggagggagttaggaggaatggagagtaattgataatgggtaaagggtttcttctgatgtataaaaatattctagaattgactgtggtgatggttactcctatctactaaaattactgaattgtgtacttttttaagaagtaaattgtatggtatataaattatatctcaaagctatt

SEQ ID NO: 996 - DNA, 145 bp, Homo sapiens
  source 1..145: mol_type = other DNA
cagaaaacatatggactgcaattgggtaaagtttctgtttcagtacttattcctacttactagccgtttaatcttggtcaagtcagccatgtggctctcaacttcctcatctgtaacataaaaggattagagtagacaatctcta

SEQ ID NO: 997 - DNA, 311 bp, Homo sapiens
  source 1..311: mol_type = other DNA
gccaggcatggtggctcatgcctggaatcccagcactttgagaagccgaggcaggtggatcacctgagatcaggagttcgaggccaacctgaccaacatggtgaaaccccatctctactaaaaatacaaaaattagctgagcatggtggcaggcacctgtagtcccagctacttggaaggctgagacatgagaatagcttgaacccgggaggtggaggttgcagtgagccgagatagcgccattgcactccagcctgggagaaagagcgatgctccgtctcaaaaaaaaaaaaaaaaagaaaagaaaagaa

SEQ ID NO: 998 - DNA, 340 bp, Homo sapiens
  source 1..340: mol_type = other DNA
cactgttctttcatgctggatgttcttgcctatgctgcctcctcagctatcaccctctcttcccctttttaatgtagaactcattcttaatgatttgtcaaaggcaccctatttcactgaaatgccttctatattccctaccctccaagtggattgtagaccttctaaggtcttttgacatctgcatatctctagcacagcacttatcacggtgattatttatctgttcatctttccaagtagacactctcattttaactccctaccctagtcgccagcatccccagcatagtgcctgtcataaaatggtgccacaatgaaaatttgaaaaatgaatgaa

SEQ ID NO: 999 - DNA, 305 bp, Homo sapiens
  source 1..305: mol_type = other DNA
ggccaggcgcggtggctcacgcctgtaatcccagcactttgggaggcagaggcggacgaatcacctgaggtcgggagtttgagaccagcctgaccaacatggagaaaccacgactctactaaaaaatacaaaaattagccgggtgtggtggtgcatgcctgtaatcccagctactcggaggctgaggcaggagaatcacttgaacccgggaagcggaggttgcggtgagccaagatcgtgccattgcactccagcctgggtaacaagagcaaaactctgtctcaaaaaaaaaaaaaaaaaaaaaa

SEQ ID NO: 1000 - DNA, 209 bp, Homo sapiens
  source 1..209: mol_type = other DNA
agaatcaccaaagcaatcttggtaaaaacaaagtagactcatacttccatttcaaaacttactacaaagctgcagtaatcaagacggtgctactggtaggaggatagacatatagatcaatttaatccagaattaaacctatacatttatgggtaattgatttttgacagaggtgccaagattcttcagcgaagaaagaatcatctttt

SEQ ID NO: 1001 - DNA, 196 bp, Homo sapiens
  source 1..196: mol_type = other DNA
ggccgagcgcagtggcacacgcctgtaatcccagcactttgggaggccgaggcgggcagatcacgaggtcaagagatagagatcatcctcgccgatacggtgaaaccccatctctactaaaaatacaaaaattggccgggtgtggtggtaggaacctgtagtcccagctactcaggaggctgaggcaggagaattg

SEQ ID NO: 1002 - DNA, 3951 bp, Homo sapiens
  source 1..3951: mol_type = other DNA
tcactcacataggattccagaacactgctacaaggctctgagtgtttgtccctcacataggattccagaacactgctgccattgtctgaatgtttgtcccccacataggattccagaacactgctgcgagagtctgaatgtatgtccctcacatatgattctagaacattgatgctagggtctgtatgtttgcccttaacatatgatttcaaaacactgctcctggattctgaatgtttgtccttcacataggaatacagaatactgctgctggagtctgaatgtgtgtcactcacatagaattccagaacactgctgcgaggatctgaatgtttgaccctcacatgggattccagaacactgctgctagggtctaaatgtctgtccctcacataggtttccagcacaatgttatgaggttctgaatgtttgtccctaacataggattccagagcactcctgctgtgctctgaatgcttctccctcacataggattccagaacactgctacgagggtctgaatgcttatccctcatataggattccagaacactcctgctgtggtctgaatgtttgttcctcacataagattccagaacactcctgccatggtctgaatatttgtccctcacataggattccagaacattcatgctggggtctcaatgtttcccttaacataggatttcagaacactgctcttggggtctgaatgtttgtccctcacacagaattctggaacactgctacaagggtctgaatgtttgtccttcacataccattctagaacactgctgccgtggtctgaatatgtccctcacataggattccagaacactgctactaggttctgaatgtttttcccacacctaggattccagaacacttctgctggtgtctgaatggttgtccctcacatatgattccaggacactgctacgagagtcttaatgtttgtccttcacataggattccagaacactgcttccgtggtctgaatgtttgcccctcacatgggattccagaacactgctgcgagggtctaaatgtctctccctcatataagattccaggacactgctacgaggttctgaatgtttgtccctcacataggattccagagcactcctgctgtgttctgaatatttgtccctcacataggattccagaacactgctaagagggtctgaatgtttgtccctcacataggactccagaacactgccaagagggtctgaatgtttgtccctcacatagtattccagaacactcctgctttggtctaaatgtttgttcctcacataggattcgagaacactcctgctgtggtctgaatgtttgtcccttacctaggattcgagaacattcacactgggatgtaaatgcttgccctgaacataggatttcagaacactgctcctggggtctgaaagtttgtccctcacataggattccagaactctcctgctgtggtctgaaagtttgtaccacacataggattccagaacactgctgctgtggtcggaatgtttgtcacatagatttccagaacactgcggctgggttctgaatgtttgtccctcacataggattacagaacactgctacgagggtctgattgttggtccctcacataggattcctgaacactgctgctgggctctgaatgtttgtccctcacattggattgcagaacactactgctatggcctgaaagtttgtccatcacataggattccagaaagctcctgctgtggtctgaatgtttctctgtcacataggattccagaacaccgcggctggggtctgaatgtccctgacataggattccagaacattgctatgagggtctgaatggttgcctttcacatagcattccagaacactgctacgagggtctgaatgttggtccctcacacaggattccagaaccctcctgctggggtctgaaagtttgtccctcccaaaggattccagaacactgctatgagggtctgaatatttgtccctcacataggattccagaacactcctgctgtggtctgaatggttgtccctcacataggattccagaacacttctgctgtggtacgaatgtttgtgtctcacgtaggattcaagaacactgctacgagggtctcaatgtttgtccctcacacaagattccagaacactgcttctggggtctgaatgcttgtccctcacatatgattacagaacactattgctggggtgtgaatgtttgtccctcacataggattccagaccactgctactggggtctcaatatctgtccctcaaaaaggattccagaacactgctacgagggtctgaatttttgtccctcacttaagactgcagaacactgcttcgagggtctaaatgtctgtccttcacataggactccagaatactgctacgagggtctgaaagtttgcccctcacataggattccagaagactgctgctggggtctgaatgtctgtccctcacatcggattccagaacactgctgctggggtttgaatgtctgtccctcacatagaattccagaagactgctgggagggtctgaatgtttgtccctcacataggattccagaacactgctacaaggttctgaatgtttgtccctcacataggattcccgagcactcctgctgtggtctgaaagtttttccctcacataggattccagaacactgctacgagggtctgaatgtttgtccttcacataggattccagaacactccttctggggtctgaatgtttgtccctcacataggattgcagaatactcctgctatggtcttaatgcttgtccctcacataggattccagaacattcatgttggggtctgagttttagcccttatcataggatttcagaacagtgctcttggggtttgaatgtttgtccttcacataggatttaagaacactcctgctgtggtctgaaagtttgtccttcacataggattccagaacactcctgctgtggtttgaatgtttgtccctcacataggattcctgagcactgctgccgtggtctgaatgttttcccctcacataggattctagaacactgttgctggggtgtgaatgtttgcccctaaaataggattccagaccactgctgctggtttctcaatgtctgtccctcaaaaaggattccagaatactgctacgagggtctgaatgtttgtctctcacttaagactccagaacactgtttcgagggtctaaatgtctgtccttcacataggattccagaacactgttaggagggtctcaatgttttcccttcacatagcattccagaacactgctatgagggtctgaatgtttgcccctcacataggattccagaacactgctgctggggtctgaacgtctgtccctcacataggattctagaacactgctgttggggtttgaatgtctgtccctcacatagaattccagaacactgctgcgagtgtctgaatgtttgtcccgcagatgggattctagaacactgctgcgagggtctaaatgtctgtccctgacataacatttcagcacactgctatgaggttttgaaatgtttgtccctcacataggattacagagcactcctgctgtggtctgaatgtttgtccctcacataggattccagaacactgctgctgggctctgaatgtttgtccctcacataggattccagaacactgctacgaggttctgaatttttgtccctcatataggattccagaacactgttacaagggtttgaaagtttgtccctcacataggattccacaacactactgctggggtctgaatgtttgtccctcacataggattctagaacactccagctggcttctgagtgtttgtccctcacataggattcctgaagactgctgctgtcgctatattcattgcgagtgtctgaatgtttgaccttca

SEQ ID NO: 1003 - DNA, 4658 bp, Homo sapiens
  source 1..4658: mol_type = other DNA
cactcacataggattccagaacactgctacaaggctctgagtgtttgtccctcacgtaggattccagaacactgctgccattgtctgaatgtttgtcccccacataggattccagaagcctgctgctggggtctgaatgtttgtcccccatctaggattccagaacactgctgtgagggtctgaatgtctgtccctcacatatgattctagaacagtgatgctagggtatgtttgcccttaacatatgatttcaaaacactgctcctggattctgaatgtttgtccttcacataggaatacagaacactgctgctggagtctggaagtttgtcactcacatagaattccagaacactgctgtgaggatctgaatgtttgaccctcacatgggattccagaacactgctgcgagggtctaaatgtctgtccctcacataggtttcccgaacaatgttacgaggttctgaatgtttgtccctaacataggatttcagagcactcctgctgtgctctgaatgcttctccctcacataggattccagaacactgctacgagggtctgaatgcttatccctcatataggattccagaacactcctgctgtggtctaaatgtttgttcctcacataggattccagaatactcctgccgtggtctgaatgtttgtccctcacataggattccagaatactcctgccgtagtctgaatgtttgtccctcacataggattccagaatactcctgccgtggtctgaatgtttgtccctcacataggattccagaacattcatgctggggtctcaatgtttcccttaacataggatttcagaacactgctcttggggtctgaatgtttgtcactcacataggattacagaacactgctgctggagtctgaatgtttgtcagtcacatagaattccagaacactgctacaagggtgtgaatatttctccctcacctagtattccagaacactgttgcaagtgtctgaacgttggtccgtcatataggattccagaacactgctgctgtagtctgaatgtttgtccctcacatagaattccggaacactgctacaagggtctgaatgtttgtccttcacataccattccagaacactgctgccgtggtctgaatgtatgtccctcacataggattccagaacactgctactaggttctgaatgtttttcccacacctaggattccagaacacttctgctggtgtctgaatggttgttcctcacatatgattccaggacactgctatgagagtcttaatgtttgtccttcacgtaggattctagaacactgctcccgtggtctgaatgtttgtccttcacatagcattccagaacactgctgctggggtctgaatgtctgcccctcaaatcagattccagaacactgctgctggggtttgaacgtctttccctcacatagaattccagaatatggctgggagggtctgaatgtttgtccctcacatgggataccagaacactgctgcgagggtctaaatgtctctccctcacataagatttcaggacactgctacgaggttctgaatgtttgtccctcacataggattccagagcactcctgctgtggtctgaatatttgtccctcacataggattccagaacactgccacgtgggtctgaatgtttgccctcacataggattccagaacactcctgctgtggtcggaatgtttgaccctcacataggattccagaacattcctgctgtggtctgaaagtttgctcaccacataggactccagaacactgctaagagggtctgaatgtccctcacattgtattccagaacactccttctgtggtctgaatgtttgttcctcacataggattcgagaacactcctgctgtggtctgaatgtttgtcccttacctaggattcgagaacattcacactgggatgtaaatgcttgcccttaacataggatttcagaacactgctcctggggtctgaaagtttgtccctcacataggattccagaactctcctgctgtggtctgaaagtttgtaccgtacataggattccagaacactgctgctgtggtcggaatgtttttctgtcacataggattccagaacactgcagctgggttctgaatgtttgtccctcacataggatttcagaactctgctacgagggtctgattgttggtccctcacataggattcctgaacactgctgctgggctctgaatgtttgtccctcacattggattgcagaacactactgctatggtctgaacgtttttctgtcacataggattccagaacgatcctgctgtggtctgaatgtttgtctgtcacataggattccagaacactgcggctggggtctgaatgtccctgacataggattccagaacattgctatgagagtctgaatggttgtctttcacatagcattccagaacactgctacgagggtctgaatgttggtccctcacacaggattccagaaccctcctgctgaggtctgaatatttgtccctcacataggattccagaacactcctgctgtggtctgaatggttgtccctcacaaaggattccagaacactcctgctgtgatctgaatggttgtccctcacataagattccggaacacttctgctgtggtacgaatgtttgtgtctcacgtaggattccagaacactgctacgagggtctcaatgtttgtccctcacataagattccagaacactgctgctggggtctgaatgcttgtccctcacatacgattacagaacagtgttgctggggtgtgaatgtttgtccctcacatggtattccagaccactgctgctggggtctcaatgtctgtccctcaaaaaaggattccagaacactgttacgagggtctgaatttttgttcctcacttaagactgcagaacactgcttcgagggtctaaatgtctgtccttcacataggattccagaacactgctacgagggtgtgaatgtttgtccttcacatagcatttcagaactgccatggtctgaatggttgtccctcacatagtattccagaaaactgctatgagggtctgaatgtttgtacctcacataggattccagaacactgctatgagggtctgaatgtttgtacctcacataggattccagaacactgctatgagtgtttgaaagtttgtccctcacataggattccagaagactgctgctggggtctgaatgtctgtccctcacatcggattccagaaccctgctgctggggtttgaatgtctgtccctcacatagaattccagaagactgctgggagggtctgaatgtttgtccctcacatacgattccagaacactgctacgaggttctgaatgtttttccctcacataggattccagaacactgctacgagggtctgaatgtttgtcctttacataggattccagaacactccttctggggtctgaatgtttgtccctcacataggattccagagcactcctgctgtggtctcaatgtttttttaatcacataggattccagaacacttctacaagggtctgaatgtttgtccctcacataggattccagaatactcctgctatggtcttaatgcttgtccctcacataggattccagaacattcatgttggggtctgaatgtttgcccttataggatttcagaacagtgttcctggggtctgaatgtttgtccttcatataggatttaagaacactcctgctttggtctgaaagtttgtccctcacataggattccagaactctcctgctgtggtctgaaagtttgtccttcacgtaggattccagaacactgctgctgtggtttgaatgtttgtccctcacataagattccagaacactgctaggagggtctgaatgtttgtccctcacataggattcctgaacagtgctacgagggtctgaatgtttgtccctcacataggattccagaacacttctgctggtgtctgaatgtttgtacctcacataggattccagaacactgctgctggggtctgaacgtctgtccctcacataggattctagaacactgctgttggggtttgaatgtctgtccctcacatagaattccagaacactgctgcgagtgtctgaatgtttgtcccgcagatgggattctagaacactgctgcgagggtctaaatgtctgtccctgacataacatcccagcacactgctacaaggttttgaaatgtttgtccctcacataggattacagagcactcctgctgtggtctgaatgtttttccctcacataggattccagaacactcctgctgtggtctgaatgtttgcccctcacataggattccagaacattcctgctgtggtctgattgttcctcatataggattccagaacactgctacaaggttctgaatttttgcccctcacataagattgcagaacactgctacaagggtttgaaagttttcccctcacataggattccacaacactactgctggggtctgaatgtttgtccctcacataggattcccgagcactcctgttgtggtctgaatgtttttccctcacataggattcctgaagactgctgctgtcactatagtcgttgcgagtgtctgaatgtttgaccttcac

SEQ ID NO: 1004 - DNA, 540 bp, Homo sapiens
  source 1..540: mol_type = other DNA
tgaggtaggagaccagaaggacttattttccattcccaaccccattgaacagagcaggatctggtcaaaacagggtgcagtggagaagcctgctgaaaccagcagatgatgatgaaagtgacctctagttgccctcactgcttatgagcataaagacactaccactgggaccatggccagtttacaaatgtcatggcaacacaccttggcaatggcctggaagttactttatatggttctggaaactccctgcccctttcccagaaagttctgaataacctacctcttaattggcatgcaattaaaagtggctctaaatacaactagctagtagcccacaggcaccaactctgggcacactgcctataggttagccctgctctgcaagaagtagcaccagttcaataaaagttgctttctctcaccagcggcttatccttgaattcttttcttggcaaagccaaggagactacagtctgggagaaatttcccacgctacaaaccagttttggggcttgcctgccctgtgtcactatcatt

SEQ ID NO: 1005 - DNA, 348 bp, Homo sapiens
  source 1..348: mol_type = other DNA
cacttggtttttacccttcctaggacctttaatagatatctttttattactaatctttgctctttgcttgtttaacctccttgtaaagtttgtgtcttccagattacaataattccatgtaaagatgatgctggcacaaggctttcaacccatcccctcttctgacccagaagataaagacatcctacctttgagccttttagaacaggtatccagggattttacctctccagtgctaggcagggtctatgcccataacatcagcaggaagcagttacagaagatgaacctccgcccttctgcaagccccttaagattaaggaggagtatataatctctgatggggaa

SEQ ID NO: 1006 - DNA, 438 bp, Homo sapiens
  source 1..438: mol_type = other DNA
taataatagacacaggcagggaggattaataaatgataaaatgtttagaggatgatcattagaatacaggatatttatactcttgaaaaccgctttcccaagtacttcattataagtaaggtgtctctaaaagggacagatctcctagacccctccttaaccaagtaaccagtcctgatatcataatggtgatggacaaactagaccttctctgcccgcagatgggctgaggttggaaactcacagcattgtctctgcagtgttcccggcaaaacgtttaggctgaatttaatcatgaagacattttcagacaacttcagaatgtagatcattgagccagacagctgacctgtcctctataaacaagtccatgtcaccaccatccatgacaacaacaaaaagatgaggaaatatttggggttcaaaataactaaagaa

SEQ ID NO: 1007 - DNA, 106 bp, Homo sapiens
  source 1..106: mol_type = other DNA
ctaaggcaagtcactttttctgggcttctggttctttgtgtttaaatgagtgggctggaccaggattgacgcacacatccctcccagttctgaagtcctgtgattc

SEQ ID NO: 1008 - DNA, 122 bp, Homo sapiens
  source 1..122: mol_type = other DNA
atcccaacactttgagaggccaaggcaggaggattgcttgaggctaggagcttgaaaccagcctgggcaacacagtgagaccccatctctacaaaaaataaaaaaacaggccaggcgcagtg

SEQ ID NO: 1009 - DNA, 267 bp, Homo sapiens
  source 1..267: mol_type = other DNA
cacttagggaggccaaggtgggtggatcacctgaggtcaggagttcgagaccagcctgaccaacatggagaaaccccgtctctacaaaaaatacaaagtttgccagtgtggtggcacatgcctgttatcccagctactcaggaggctgaggcaggagaatcgcttgaacccgaaaggcagaggttgcagtgagtggagatcacgccattgcactccagcctgcgcaacaagagtgaaactccatctcaaataaataaataaaataaa

SEQ ID NO: 1010 - DNA, 285 bp, Homo sapiens
  source 1..285: mol_type = other DNA
gctgggcatggtggctcatgcctgtaatcccagcactttgggaggtcgaggcaggaggatcacgaggttaggagtttgagaccagcctgaccaacatgaagaaaccctgcctctactaaaaatacaaaattagccaggcatggaggcaggctcctgtaatcccaactactcgggaggctgaggcaggagaatcgcttgaacccgggaggcggaggttgcggtgagttgagattgtgccattgcactccagcctgggtgacaaagcgagtctcaaaaaaaaaaaaa

SEQ ID NO: 1011 - DNA, 330 bp, Homo sapiens
  source 1..330: mol_type = other DNA
gaccaggtgtagtggctcacacttgtcatcctagcactttaaaaggctgaggcagggctgggtgctgtggggggccgaggcaggcagatcacttgaggtcaggagttcaagaccagtctggccaacatggtgaaaccccatctctacgaaaaatacaaaacaattagccgggagtggtagcacatgcctgtaatcccagctacttgggagaccgaggcaggagaatcactcgaacctgggaggcgaaggttgaagtgagctgagattgcgccactgcactccagcccaggcaacagagtgagactttgtctcaaaaaaaaaaaaaaaaaa

SEQ ID NO: 1012 - DNA, 311 bp, Homo sapiens
  source 1..311: mol_type = other DNA
ggccaggcatggtggctcatgcctggaatcccagcactttgagaagccgaggcaggtggatcacctgagatcaggagttcgaggccaacgtgaccaacatggtgaaaccccatctctactaaaaatacaaaaattagctgagcatggtggcaggcacctgtagtcccagctacttggaaggctgagacatgagaatagcttgaacccgggaggtggaggttgcagtgagccgagatagcaccattgcactccagcctgggagaaagagcgatgctccgtctcaaaaaaaaaaaaaaaaaaaagaaaagaaa

SEQ ID NO: 1013 - DNA, 1033 bp, Homo sapiens
  source 1..1033: mol_type = other DNA
ttcaacaaatggtcctgggacaactaaatatccacatgtaaaagaatcaagttagactccctcctcgcacataaaaattaactcaaaatggatcagagacctaaaggtaggtggtaaaattataaatcacttagaaatagtaaatctttgtaatgtgggataagcaaagttttcacaaatatgactgaaagcacaagcaacaaaagaaaaaataaattgtattccatcaagttaaaaacatttgggctgaaaagtatatcatcaagaatgtgaaaagacagtacatagaatgacagaaaatatctgcaaatcatattatctgataagagacttgtatttaggatatattttttaaaaactattacagttcaatattaaaaagataaaccaattataaagtaggtaaaggatctgaacagacattctccaaagaagatacataatgactaataagtatatgaaaagatgttgaaaatcatcaaccatcagggaaatgtaaatcaaaaccacaatgagataaacacttcacattacagatgaatataataaaaaagacagacaataacaactgttgatgaggatgtggagaaactggaattctcatacactgctggttggaatgtaaaataatgtacccacttcagaacagtctgacagttcctgaaaaggttaaacagcattaccatctgacgcagcaattctgctcctaggtatatatccaagaaatatgaagataaatgtctaccaaaaaattatacaagaatgttcataacagaattattgataatactcaaaaagtagaagcaactcaaatgtcaatcaactgatgatggataaataaaatgataaaatgtggtaaatccatatgataaaatattattcagccataaaaaggcacagagtactgacaaatgctaccacatcaatgaactttgaaaacctcatgctaagtgaaagaagctgtcataaattactacatgctgcatgtttccatttgtatgaaatgtccagaagaggcatttctggaacagaa

SEQ ID NO: 1014 - DNA, 245 bp, Homo sapiens
  source 1..245: mol_type = other DNA
catttgttgaattaagtgcccagaacaagtacatctatatatagagaaagtagattagtggttgtcagagactgtaagaagtggggaattggagagtgactgcccataggtacaggcatgctttttggcattatgaaaatattctggaattaggtagtggtgatggttgcagaacttttggaatatggtaaaagacactgaaatatatgcttaaaaatggtgatttttgtgatatatgaattata

SEQ ID NO: 1015 - DNA, 304 bp, Homo sapiens
  source 1..304: mol_type = other DNA
gccaggctcagtggtttactcttgtaatcccagcacttttggaggcctaggtgggaggatcacttgaggccagaagttcaaaaccagcctgagcaacatagcaagaccttgtctccatgaaaaataaaaaattagccagaaatggtgatgtgtgcctagagttccaactacttggaaagctgaggcaagaggatcgcttgagcctaggagttcaaggttgcagtgatctataatcaccactgcactccagcctgggtgacagaacaagaccctgtctcaaaaaaaaaaaaaaaaaaaaaaaaaa

SEQ ID NO: 1016 - DNA, 118 bp, Homo sapiens
  source 1..118: mol_type = other DNA
tgggaaggggatggggaagaggctgctccacctgagatctggctccaggacttacagcaaggggaacttgggcaagttacagactgtctatgcctcagtttctttatcagcaaaacag

SEQ ID NO: 1017 - DNA, 82 bp, Homo sapiens
  source 1..82: mol_type = other DNA
gtccccaaactgactgcacatctgagtcatgttaacaaacacattccaggccccacctgagccctctgaatcagaatccctg

SEQ ID NO: 1018 - DNA, 175 bp, Homo sapiens
  source 1..175: mol_type = other DNA
gttcttgcagaaaacgcttagcctgagtttcataggaggtaatcaccagacaactgcagaatgtagaacactgagcaggacaactgacctgtctccttcacatagtccatatcaccacaaatcacacaacaaaaaggagaagagatattttgggttcaaaaaaagtaaaaagata

SEQ ID NO: 1019 - DNA, 438 bp, Homo sapiens
  source 1..438: mol_type = other DNA
taataatagacacaggcagggaggattaataaatgataaaatgtttagaggatgatcattagaatacaggatatttatactcttgaaaaccactttcccaagtacttcattgtaagtaaggtgtctctaaaagggacagatctcctagacccctccttaaccaagtaaccagtcctgatatcataatggtgatggacaaactagaccttctctgcccgcagatgggctgaggttggaaactcacagcattgtctctgcagtgttcctggcaaaacgtttaggctgaatttaatcatgaagacattttcagacaacttcagaatgtagatcattgagccagacagctgacctgtcttctataaacaagtccatgtcaccaccatccatgacaacaacaaaaagatgaggaaatatttggggttcaaaataactaaagaa

SEQ ID NO: 1020 - DNA, 174 bp, Homo sapiens
  source 1..174: mol_type = other DNA
tgtggtggatttgtaatgtatcagttttgccaagctgaatgcacatttcccagatttgccatctttagatagctctaggttagcctgggcaacaggagacacttggaagatagaattcgagtggctgttacactcttttgtatactgggaagggcgttgttacagctcaggcat

SEQ ID NO: 1021 - DNA, 291 bp, Homo sapiens
  source 1..291: mol_type = other DNA
ggccaggtgtggtggctcacacctagaatcccagcactttgggaggctgaggtgggcagatcacgaggtcaggagttcaagaccagcttggccaacatagtgaaaccccgtctctacaaaaaatacaaaaaaattagccaggcctggtggcagatgcctctaatcccagctgcttgggaggctgaggcaagaattgcttgaacttgggaggcggaggttgcagtgggctgagatcacgccactgcactccagcccaggcgacagtgcgagattctgtctgaaaaaaaaaaa

SEQ ID NO: 1022 - DNA, 213 bp, Homo sapiens
  source 1..213: mol_type = other DNA
agcctgggcaacataaagagacttcatctctacaaaaaaataataaaataattagccgggtatggaggcacttgactgtgatcccagctacttgggaggctgaggcaagaggatcacttgatcctggggagattgaggctgcagtgaccatccactgtactctagccagggtgacagacagaatgagacacagtctcaaaaaaaaaaaaaaaa

SEQ ID NO: 1023 - DNA, 95 bp, Homo sapiens
  source 1..95: mol_type = other DNA
accctggaggcagaggttgcagtgagccgagatcacgccactgcactccagcctgggcaaaagtgtgagactctgtcttccaaaaaaaaaaaaaa

SEQ ID NO: 1024 - DNA, 202 bp, Homo sapiens
  source 1..202: mol_type = other DNA
ggccaggctcagtgcctcacgcctgtaatcccagcactttgggaggctgaggcgggtggattaccttatgtcaggagttcaagaacagcctggccaacatggtgaaaccctgtctctactaaaaatataaaaattagccaggcgttgtggcgtgtgcctgtaatcccagctactcgggaagctgaggcaagagaatcgcttg

SEQ ID NO: 1025 - DNA, 275 bp, Homo sapiens
  source 1..275: mol_type = other DNA
tttgggaggccgaggcaggtggatcacgaggtcaggagatggagaccgtcctggctaacatggtgaaaccccgtctctactaaaaatacaaaaaattagctgggcgtggtggtgggcacctgtaatcccagctactcgggaggctgaggcaggagaatggtgtgaatctgggaggcggaggttgcagtgagccgagatcgcgccactgcactctagcctgggcgacagagcaagactccgtctcaaaaacaaaaacaaaaacaaaaccaaaaaaa

SEQ ID NO: 1026 - DNA, 301 bp, Homo sapiens
  source 1..301: mol_type = other DNA
gccgggcgcggtggctcacgcctgtaatcccagcactttgggaggccgaggcgggcggatcacgaagtcaggaaatcgagaccatcctgtcaaacacggtgaaaccccgtctctactaaaaatacaaaaaaattagccaggcatggtggcgggcgcctgtagtcccagctactaaggaggctgaggcaggagagtggcgtgaacccgggaggcggagcttgcagtgagccgagatagcgccactgcactccagcctgggcgacagagcgagactccgtctcaaaaaaaaaaaaaaagaaaa

SEQ ID NO: 1027 - DNA, 273 bp, Homo sapiens
  source 1..273: mol_type = other DNA
ggcctggtggctcaagcctgtaatcccagcattttggaaggccaaggtgggtggatcacttgaggtcaggagtttaagaccaacctggccaacatgacgaaaccccatctctactaaaaatacaaaaattagccgggtatagtggtgagcacctgtaatcccaactactcaggaggctgaggcacgagaattgcttgaacctgggaagtggaggctgcagtgagccaagactgcaccactgcactccggcgtgggcggcagagccagactctg

SEQ ID NO: 1028 - DNA, 2059 bp, Homo sapiens
  source 1..2059: mol_type = other DNA
agacaaggatgctcactctcactactcctattcaacatagtactagaagtcctagccagagcaatcaggcaaaagaaaaaaataaaatacatccaaagagaaagaagaaaagtcaaactatctctgtttgcagacaatataattttacacctagaaaaccccagtctttgctaaaaagctcctagatctgataaatgacctcagcaaagtttcaggatacaaaatcaatgtacaaaaatgagccacatttctatacatcaccaacatccaagctgagagtcaaatcaggaccataatcccattcataaaatacctaggaattcagctaaccagggaggtgaaagatccctacagtgagaattacaaaacacagctaaaggagatcagagatgacacaaacaaatggaaaaacattccatggtcatggatagaaagaatcaatatcatgaaaatggccatactgcccaaagcaatttacagattcaatgctatccttttcaaactaccaatgacatttttcacaaaattagaaaaaaattctaaaattcatttgaaacaaaaaaataagcctgaatagccaaagcaagcctaagcaaaaagaacagaggcatcatactaccttacttcaaactatattacagggtatagtaactaaaacagtatgtcctggtgcagaaaacagacacataggccaatggaacagtagtaaagctacattcctacaagtatctaatccttgataaagccaataataacgagcaatggggaaaggaatgcctattcaataagtggtactggaataattggccagccatatgcagagaatattgaaactggaccctgcatttcaccatatgcaaaatttaactcaagatggattaaggacttaagtgtgaaacctaaaactgtaaaaaccctggaagacaacctaggaattaccatttgagacacaggccttggtgaagacttcatgatgaagactccaaaagcaattgcaacaaaaacaaaaattgaccataggacctaatcaaactaaagagcttctgcacagcaaaaaacaaaaaaacaaaacaacaaacaacaaaacaaaacaaacaaaaaaccaccctatcaacagagtaaacagacaacctacagaatgggagaaaatatttgcaaactatgcatctgacgaaggtcgaatatccagaatctataaggaacttaagcaaattaacaagcaaaacccaaacaatctcgttaaaaaatgggcaaaggacatgaacagacacttctcaaaagaagacatacatgtggccaacaagcatatgaaaaaaattttcaatatcactaatcattagagaaatgcaaatcaaaatgcaaatcaaaaccacaatgagataccacctcacaccagtcaaatggctattactaaaaagtgaaaaacaaaaaacaaaaaaacagattctggtaacgttgcagagaaatgggaaatagttcagccactgtggaaagcagtttggaggtttctcagagaacttaaaatagaactacgattcaacccaacaaccctattactgggtatacagccaaaggaatataagtcattctaccataaagacacatgcacgtgaatgttcatcgcagcactattcagaatagcaaagacatagaatcaacctggattcccatcaacagtggactggataaagagaacatggtacatatacaccatgcaatactacatagccataaaaatgagattatgtcttttgcaataacatggatggagttggagccattatcctaagtaaattaatgcaggaacagaaaaccaaataccacatgttctcacttataagtgagtgctaaacatcgtgtacgcatggacacaaaaaaagggaacaatagatactggggcctacttgagggtggacagtgggaaagtgtgaggaatgtaaacctacaggttgggtactacgctgataacctaggtgacaaaattatctataaaccaaacccccacaacacacaatttgcccatgtaacaaacctgcacatttaccccttgaacctaaaa

SEQ ID NO: 1029 - DNA, 438 bp, Homo sapiens
  source 1..438: mol_type = other DNA
aataatagacacaggcagggaggattaataaatgataaaatgtttagaggatgatcattagaatacaggatatttatactcttgaaaaccactttcccaagtacttcattataagtaaggtgtctctaaaagggacagatctcctagacccctccttaaccaagtaaccagtcctgatatcataatggtgttggacaaactagaccttctctgcccgcagatgggctgaggttggaaactcacagcattgtctctgcagtgttcccgtcaaaaagtttaggctgaatttaatcatgaagacattttcagacaacttcagaatgtagatcattgagccagacagctgacctgtcctctataaacaagtccatgtcaccaccatccatgacaacaacaaaaagatgaggaaatatttggggttcaaaataactaaagaaa

SEQ ID NO: 1030 - DNA, 175 bp, Homo sapiens
  source 1..175: mol_type = other DNA
tgttcttgcagaaaacgcttagcctgagtttcataggaggtaatcaccagacaactgcagaatgtagaacactgagcaggacaactgacctgtctccttcacatagtccatatcaccacaaatcacacaacaaaaaggagaagagatattttgggttgaaaaaaagtaaaaagat

SEQ ID NO: 1031 - DNA, 175 bp, Homo sapiens
  source 1..175: mol_type = other DNA
gttcttgcagaaaacgcttagcctgagtttcataggaggtaatcaccagacaactgcagaatgtagaacactgagcaggacaactgacctgtctccttcacatagtccatatcaccacaaatcacacaacaaaaaggagaagagatattttgggttgaaaaaaagtaaaaagata

SEQ ID NO: 1032 - DNA, 438 bp, Homo sapiens
  source 1..438: mol_type = other DNA
taataatagacacaggcagggaggattaataaatgataaaatgtttagaggatgatcattagaatacaggatatttatactcttgaaaaccgctttcccaagtacttcattataagtaaggtgtctctaaaagggacagatctcctagacccctccttaaccaagtaaccagtcctgatatcataatggtgatggacaaactagaccttctctgcccgcagatgggctgaggttggaaactcacagcattgtctctgcagtgttcccagcaaaaagtttaggctgaatttaatcatgaagacattttcagacaacttcagaatgtagatcattgagccagagagctgacctgtcctctataaacaagtccatgtcaccaccatcaatgacaacaacaaaaagatgaggaaatatttggggttcaaaataactaaagaa

SEQ ID NO: 1033 - DNA, 885 bp, Homo sapiens
  source 1..885: mol_type = other DNA
accaattttcatcaatatctatctcctctttcttttctattactgaaacaaaaaatagcccactttctcccaaaagtcaatccagccacaggtggactaagcctatcccttccagccttctgagagctctcattttcccctctggccatcccctctgtctgttggatctttccaatcagcattcagacaggctgtagaatctttccgtgctaaaaaaaaaaaaaaaaaaaaaaaagcaaaacaaaacccaggtctagcattctattaccccttagagccaaatttctccacagagttgacgagacacagggttcacttcctcacttgccattcgacctttaatcattttaaaccaacttccacccccagatcatagtgaccactatttttgttaaggtcaccactggccactttgctaatctcatcttactccatctcttagattctgccagttgctcacttcattcttgttaactcttctcctggtttccataacacctcattttcctagctttcctcccacctctccaggccttctttatctgcttcctttgcaggtcccttttttacctgatctctcaactttagagttcctctggactctactctgagtcatcttctcttctcatgctgcaagttctctccatgccaacaactcccaaatttgcaggtccattccagcagatctgtatacacatctacctgcttgacatctccctggatgtctcaaacttaacaggatcaaacatgaattcttcaattctgtgtatagccttcctcctgaaacctttttccttcagttttccatatcttaataaatggctcctttatccacccagttgctcatgccagaaatttggaagtaattcttgatacctctctccc

SEQ ID NO: 1034 - DNA, 221 bp, Homo sapiens
  source 1..221: mol_type = other DNA
cagtgatgaagagcatagactttggggccggagtggccagagtgctggttaaatgcccactaccacttactagggtgtgagcttggtcaagttacttaacattgcagagcccgttttcccatctctaaaatagaaatagtggtggcacctgcctcctggggttgttgtgactgggttaacatgtttgtacagtactcagaacaatgcatggcacatagtaa

SEQ ID NO: 1035 - DNA, 438 bp, Homo sapiens; identical to SEQ ID NO: 1029
  source 1..438: mol_type = other DNA

SEQ ID NO: 1036 - DNA, 175 bp, Homo sapiens; identical to SEQ ID NO: 1030
  source 1..175: mol_type = other DNA

SEQ ID NO: 1037 - DNA, 540 bp, Homo sapiens; identical to SEQ ID NO: 1004
  source 1..540: mol_type = other DNA

SEQ ID NO: 1038 - DNA, 348 bp, Homo sapiens; identical to SEQ ID NO: 1005
  source 1..348: mol_type = other DNA

SEQ ID NO: 1039 - DNA, 438 bp, Homo sapiens
  source 1..438: mol_type = other DNA
aataatagacacaggcagggaggattaataaatgataaaatgtttagaggatgatcattagaatacaggatatttatactcttgaaaaccgctttcccaagtacttcattataagtaaggtgtctctaaaagggacagatctcctagacccctccttaaccaagtaaccagtcctgatatcataatggtgatggacaaactagaccttctctgcccgcagatgggctgaggttggaaactcacagcattgtctctgcagtgttcccggcaaaacgtttaggctgaatttaatcatgaagacattttcagacaacttcagaatgtagatcattgagccagacagctgacctgtcctctataaacaagtccatgtcaccaccatccatgacaacaacaaaaagatgaggaaatatttggggttcaaaataactaaagaaa

SEQ ID NO: 1040 - DNA, 175 bp, Homo sapiens
  source 1..175: mol_type = other DNA
tgttcttgcagaaaacgcttaacctgagtttcataggaggtaatcaccagacaactgcagaatgtagaacactgagcaggacaactgacctgtctccttcacatagtccatatcaccacaaatcacacaacaaaaaggagaagagatattttcggttgaaaaaaagtaaaaagat

SEQ ID NO: 1041 - DNA, 441 bp, Homo sapiens
  source 1..441: mol_type = other DNA
aataatagacacaggcagggaggattaataaatgataaaatgtttagaggatgatcattagaatacaggatatttatactcttgaaaaccgctttcccaagtacttcttcattataagtaaggtgtctctaaaagggacagatctcctagacccctccttaaccaagtaaccagtcctgatatcataatggtgatggacaaactagaccttctctgcccgcagatgggctgaggttggaaactcacagcattgtctctgcagtgttcccggcaaaacgtttaggctgaatttaatcatgaagacattttcagacaacttcagaatgtagatcattgagccagacagctgacctgtcctctataaacaagtccatgtcaccaccatccatgacaacaacaaaaagatgaggaaatatttggggttcaaaataactaaagaaa

SEQ ID NO: 1042 - DNA, 100 bp, Homo sapiens
  source 1..100: mol_type = other DNA
tgttcttgcagaaaacgcttagcctgagtttcataggaggtaatcaccagacaactgcagaatgtagaacactgagcaggacaactgacctgtctccttc

SEQ ID NO: 1043 - DNA, 297 bp, Homo sapiens
  source 1..297: mol_type = other DNA
ggctgggtgcagtggctcatgcctgtaatcccaacactttgggaggccgaggcagatgtctcacctgagaccaggaattccagaccagcctatgcaatgtggcaaaaccccatctctactaaaaatacagaaaagagctgagtgtggtggtgctcacctgtaggtcccagctacttgggggctgaggcaggaggatcacctgagccttgggaggtcaaggttgcggtcagctgtgattgtgccactgcactccagcctgggcaacagagtgagatcttgtctcaaaaagaaaaaaaa

SEQ ID NO: 1044 - DNA, 175 bp, Homo sapiens; identical to SEQ ID NO: 1018
  source 1..175: mol_type = other DNA

SEQ ID NO: 1045 - DNA, 438 bp, Homo sapiens
  source 1..438: mol_type = other DNA
taataatagacacaggcagggaggattaataaatgataaaatgtttagaggatgatcattagaatacaggatatttatactcttgaaaaccgctttcccaagtacttcattataagtaaggtgtctctaaaagggacagatctcctagacccctccttaaccaagtaaccagtcctgatatcataatggtgatggacaaactagaccttctctgcccgcagatgggctgaggttggaaactcacagcattgtctctgcagtgttcccggcaaaatgtttaggctgaatttaatcatgaagacattttcagacaacttcagaatgtagatcattgagccagacagctgacctgtcctctataaacaagtccatgtcaccaccatccatgacaacaacaaaaagatgaggaaatatttggggttcaaaataactaaagaa

SEQ ID NO: 1046 - DNA, 175 bp, Homo sapiens; identical to SEQ ID NO: 1018
  source 1..175: mol_type = other DNA

SEQ ID NO: 1047 - DNA, 438 bp, Homo sapiens
  source 1..438: mol_type = other DNA
taataatagacacaggcagggaggattaataaatgataaaatgtttagaggatgatcattagaatacaggatatttatactcttgaaaaccgctttcccaagtacttcattataagtaaggtgtctctaaaagggacagatctcctagacccctccttaaccaagtaaccagtgctgatatcataatggtgatggacaaactagaccttctctgcccgcagatgggctgaggttggaaactcacagcattgtctctgcagtgttcccggcaaaacgtttaggctgaatttaatcatgaagacattttcagacaacttcagaatgtagatcattgagccagacagctgacctgtcctctataaacaagtccatgtcaccaccatccatgacaacaacaaaaagatgaggaaatatttggggttcaaaataactaaagaa

SEQ ID NO: 1048 - DNA, 562 bp, Homo sapiens
  source 1..562: mol_type = other DNA
tctgggcctgaggtctcctgtgcgcctctgggcgcctgcgcccgcgctgtgcctttgcgagggcggagctgcgttgtgctcagcacagactcggagagcatcgcgagggcggagctgagttctcctgtgcacagacttcggagatacagcgaaggcggagcagtgttctccttggcacagacccgggcgggccgggggcaccgcgagggcggagctgcgttctgctcagcacagacccgggggacaccgcgaaggcagagcagcgttctcctcagcacggaccttgggggcactgcctcgctttgggacaactcggggccgcatcgacggtgaataaaatccttcctgtttgcagccctgaataatcagggtcagaaaccagatagaagggttcagtgtggaaaacgggaaaccaaaagcccctctgaatcctgcccaccgaggttctccccagccaaggtgaggcggccgcagtgcgagatccacaccgcagcctcggaagacaaatgcagcattcctaatgcagacatggcactcaaaagatgacaccccccttgctcat

SEQ ID NO: 1049 - DNA, 1263 bp, Homo sapiens
  source 1..1263: mol_type = other DNA
gtaaattttacaactaaataaggattaccaggcataaaaagcagcagacaatcatgatgcaaactgaaaataatcaatcaaaactgacccagaacttaaatagatgttaaaattagcagaggaggacattaaaactgtttttatacatgtatctcatataatcaaaacattaaatagagacatgggagataaacaagaaaagccaaaatcaaactttcaaagacaaaaacatttgagatgaaaattacattggatgaactaaggcagattagaaactgcagaagaaaagattagcaaacttgaagatacaagaacagacactagctaaagtacaaaaagaaaaaaaaatgttaaaaagtgatttttaaaaagcatcagtgagcagtcaggcaacttcaaatggcctaataatatgcaggtaactggagtccccaaaggagaaaaaaaagaaagagaaaaaaaatacttgaagaaacaactgctgaaaatgttctagccataacaagacctattaactcacggatccaagaaactcagcaaaccccaagcacaagaaacatgaagaaaattacactaagggataacataatcaaattgttcaaaatcaaggaaacattattaatagcaggtgtataaaaagacatgttacctatagaagaacaaagataagaacaacatcagatttcttttgagaaacaatgcaagtgagaagacagcggtacatctctaaagttctagaagaaaaaaggccaactagaattctatgcctagcaaaaatatctttcaaaaatgaaggtgaaataaagacacaccagaaacataaataatgaaataattcatcaccaggagaccttcactgcaagaaatgttaaaggatattcttcagaaacaaaatgatgtcagatgaaaatctggaccaatacgaaggaataaagagcaccaaagtggtaactatatgagcaaacatcttttaaattttttattatttaaatctctaagagatacatgtttaataaaaaaacagcaaaatgttacagagtttataacatatgtaaaagtcaaatgcatggcagcaatagcacaaagtgcaggagggaggaaaagaaagtaaatgaaggaatgcttttattatagatgaagtgtacaatattacttgacctctctaaatgtgcactataatcttaaaggaaccacaaaaataatttttaaaaataggtaaaagtaataaaaagaggcaaactggaatcataataaataatgtaa

SEQ ID NO: 1050 - DNA, 135 bp, Homo sapiens
  source 1..135: mol_type = other DNA
tatgcttcccagactctttggcagttgcactgggtactggctgagttctggaaaacaggaatgtgagcagagtgctgcagatctccttgtcaggagcacctaagaactggcatgactctacaccctctctccttc

SEQ ID NO: 1051 - DNA, 402 bp, Homo sapiens
  source 1..402: mol_type = other DNA
gtacttgacttactccaagaccagcaatagatagagccctagcagatccttgataacactgtctgaaaagacagagccccagggaatgagttccagagactctgtctacacagtccgcccctagcacggataaggataagaggaaaaaacaacaaatgcctttactaccttctctttcccccttaccatttctggttttgtaagttcctgacttcccttcagtgcagctgcaaggtcaccagctatgcttgcgttgcaagacctgtcagtttgattaactgccttctttctgcttctgtaagccctctagcctgcccagcgagttttgcgccagcaaattcccgcgacgcaattcaaactagccaaccccccctttcagaagagtgtataaaagtcaaacct

SEQ ID NO: 1052 - DNA, 228 bp, Homo sapiens
  source 1..228: mol_type = other DNA
ctaagggcttttggagctgatggcaggggtttgatgaatccaaatgagctctagacattatcacagactgaatagatcttaactgtctcctacatgtgtgttttcaaatgtgtatagatgctattgttattaataaagttaccaattaatttaaaggctttgctggattcttttatctacagtgtattttctcaatgaatgaaattaacagatacaacttccactgtg

SEQ ID NO: 1053 - DNA, 124 bp, Homo sapiens
  source 1..124: mol_type = other DNA
atgagctgcatgactgtgaaccaatgaggcttctcttggcctcatttgtaaaaaggagattaactctgtagtcccgcctatattgcatggcctccagaaaagcaaatgaggtggtaagtgtaaa

SEQ ID NO: 1054 - DNA, 89 bp, Homo sapiens
  source 1..89: mol_type = other DNA
agcattacccattggaaatttatacagtgaggaacatgttctgtatctatgctgttcaatacaatagccactacccatgtgtaattctt

SEQ ID NO: 1055 - DNA, 304 bp, Homo sapiens
  source 1..304: mol_type = other DNA
gccaggcgcagtggctcatgcctgtaatcccagcactctgggaggctgaggcggacggatcatgaggtcaggagatcaagaccaccctggctaacacggtgaaaccctgtctctactaaaaatacaaaaaattagccgggcatggtggcacacgcctgtaatcccagctactcaggaggctgaggcaggagaatcgcttgaacccgggaggtagaggttgcagtgagctgagattgcgccactgcacccccctaggcgacagagcgagactctgtctctaaataaataaataaataaataaata

SEQ ID NO: 1056 - DNA, 177 bp, Homo sapiens
  source 1..177: mol_type = other DNA
gtatcatgggatagtgggacgagcactggtttaggagtcaagatatctgggttctcactctactcagtcccagcagagctgttgtataaccttgattaagtcatttagcctctctggatttctatttcctcatctgtaaaatagagttaaatgtatgtaagattgattctgattctg

SEQ ID NO: 1057 - DNA, 300 bp, Homo sapiens
  source 1..300: mol_type = other DNA
gcccggcgcggtggctcacgcctgtaatctcagcactttgggaggccttggcgggcggatcatttgaggtcagaagttcgagacgagcctggccaacatagagaaatctcgtccctactaaaaatacaaaaattatccggacagtagtggcgtgcatctgtaatcccagctacttgggaggctgaggcaggataatcccttgagcctgggaggcagagcttgcggtgagccgagattgggccactgctctccagtctgggcgagagagtgagaccctgtctcaaaaaaaaaaaaaaagaa

SEQ ID NO: 1058 - DNA, 67 bp, Homo sapiens
  source 1..67: mol_type = other DNA
ggaagctaacaggacacaatgggtcaaaactcatttcaccttagattcatcttagctgaagaagggg

SEQ ID NO: 1059 - DNA, 309 bp, Homo sapiens
  source 1..309: mol_type = other DNA
ggacacagtggctcatgcctgtaatcccagcactttgggaggctgagacaagaggatcacctgaggccaggagtttgagaccagcctgggcaacatagtgagaccctgtctctacaaaaaaattttaagaagaattagccaggtgtggtggtgcacacctgtagtcccagctactcaggagggtgaggcggaaggatcacctgagcccagaattcaaggtaacagtgagctatgttcatgccaccacattccagtctgggcgacagagtaagaccctgtctcagaaaaaaaaaaaaaaaaaaaaaaaaa

SEQ ID NO: 1060 - DNA, 307 bp, Homo sapiens
  source 1..307: mol_type = other DNA
ggccaggcgcagtggctcactcctgtaatcctagcactttgggaggccgaggtgggcagattacttgaggtcaggagttcaaaaccaacctggccatcatggtgaaaccccgccctaccaaaaatacaaaaaattagtggggcgtggtggtgtatgcctgtaatcccagctacttgggaggctgaggcaggagaatcgcttgaacccaagaggcagagggtgcagtgagccgagatcgtgccactgcactccaacctgggcgacagagcaagactctgggaaaaaaaaaaaaaaaaaacagaaaaaa

SEQ ID NO: 1061 - DNA, 292 bp, Homo sapiens
  source 1..292: mol_type = other DNA
gcgcggtggctcatgcctgtaatcccagcactttggcaggctgaggcgggcggatcacgaggtcaggagtttgagatcagcctgcccaacatggtgaaaccctgtctctactaaaaatagaaaaattagctgggcgtggtggcgtgtgcctataatcccagctactcaggaggctgaggtaggagaatcacttgaacccgtgaggcgaaggttgcagtgagccaagatcctgccactgcactccagccagggcaacagaggacagagtgaggctccgtttcaaaaaaaagaa

SEQ ID NO: 1062 - DNA, 167 bp, Homo sapiens
  source 1..167: mol_type = other DNA
gatgtagcaaattgagtgtgggttttggagtctgagcctcaggctcaaatccaggccaagtgatcttgggcaagttaatctctgggaactttgggtttcttatcctcaaaaaaggcgatggaagggctggggaagtgattaaataaaagcaacgcaagaaaaatgcc

SEQ ID NO: 1063 - DNA, 292 bp, Homo sapiens
  source 1..292: mol_type = other DNA
cagggaatccaagaaaggagacagacaaagtgagtctcaaggatgagagcagagaaaagctcgagataagagctgtgcagccgggtcaggaagtgatcggtctaggtcggaacaggagaatcagttagacacaacggatgtgtttgagcctttggaaaacggtatcgttaggcatgtggcgaaaacgttggggtacttgaaaaaaaggctggccatgggttagtaaaaagctagatatgtgaaaatattaggtaattattaactcaaaagaaaaaaaaagattgtacaggaa

SEQ ID NO: 1064 - DNA, 95 bp, Homo sapiens
  source 1..95: mol_type = other DNA
acctcacaggcctaggcgaggaaaatgccaagagctgtaaaagggcttggaaaagtcaaaaaggtgatgtataaatgtaataattgattatcatt

SEQ ID NO: 1065 - DNA, 463 bp, Homo sapiens
  source 1..463: mol_type = other DNA
gtgaaagttgcaggtaccaaaatggaactacttccaccaatccctaaacaaatggagtcgggaggccacgaagggggagctctcatgcaggaatacctgcagcaggcctcctcacaagacgctcctgcacgtcctgcacgtttgcctgtaaccggacttactgcagggaaattcctcaggactgcagtattctagataagcagcttgcacaaggacgtcggcctggtaaggctctctccaacaacaagctaacgcccactcctgcagcaagcgcccacagccagtggtttttgttacaaaacaacttttgtgagctcatctgtattttccccttcgcccggccctctcagataggcctatgatctgtcatggcacgaacagcctaggctgcaaccccctgcgattcccagattaactcacttgtcctggagagcctgcctctgggtttcctttcaggttgaca

SEQ ID NO: 1066 - DNA, 309 bp, Homo sapiens
  source 1..309: mol_type = other DNA
gccgggcgcggtggctcacgcctataatcccagcacgttgggagccctaggagggcagatcacgaggtcaggagttcgaaatcagcctggccaaaatggtgaaaccccgtcttgactaaaaatgcaaaaattagctgtgcgtggtagcgcatgcctgtagtcccagctgctcgggaggctgaagcaagagaatagtttaagccctggaggcggaggttgcaatgagccgagatcgcgccattgcactccagcctgggcgacagggcgaggctccgtctccaaaaaaaaaaaaagaaagaaagaaagaaa

SEQ ID NO: 1067 - DNA, 75 bp, Homo sapiens
  source 1..75: mol_type = other DNA
gggcccctatccctaattctactatgtggctctcaacaccttgtatttaataggtacacaataaatgtttttgaa

SEQ ID NO: 1068 - DNA, 183 bp, Homo sapiens
  source 1..183: mol_type = other DNA
attctagttttgtttttaggagtcgtgtgactttgggcaaaacatttagcctcttgagtttccttatctatagtgacatagctctctcaaccttgctgtgtggaataaacaaaagattttgcaaatcaatatatagtgcttcataaatgttaacatgttactaaggatcagtgaatacagccc

SEQ ID NO: 1069 - DNA, 5533 bp, Homo sapiens
  source 1..5533: mol_type = other DNA
tctggtgcccaacgtggaggcttttctctagggtgaaggtacgctcgagcgtggtcattgaggacaagtcgacgagagatcccgagtacatctacagtcagccttacggtaagcttgtgcgctcggaagaagctagggtgataatggggcaaactaaaagtaaaattaaaagtaaatatgcctcttatctcagctttattaaaattcttttaaaaagagggggagttaaagtatctacaaaaaatctaatcaagctatttcaaataatagaacaattttgcccatggtttccagaacaaggaactttagatctaaaagattggaaaagaattggtaaggaactaaaacaagcaggtaggaagggtaatatcattccacttacagtatggaatgattgggccattattaaagcagctttagaaccatttcaaacagaaaaagatagcgtttcagtttctgatgcccttggaagctgtataatagattgtaatgaaaacacaaggaaaaaatcccagaaagaaacggaaggtttacattgcgaatatgtagcagagccggtaatggctcagtcaacgcaaaatgttgactataatcaattacaggaggtgatatatcctgaaacgttaaaattagaaggaaaaggtccagaattagtggggccatcagagtctaaaccatgaggcacaagtcatcttccagcaggtcaggtgcccgtaacattacaacctcaaaagcaggttaaagaaaataagacccaaccgccagtagcctatcaatactggcctccggctgaacttcagtatcggccacccccagaaagtcagtatggatatccaggaatgcccccagcaccacagggcagggcgccataccctcagccgcccactaggagacttaatcctacggcaccacctagtagacagggtagtgaattacatgaaattattgataaatcaagaaaggaaggagatactgaggcatggcaattcccagtaacgttagaaccgatgccacctggagaaggagcccaagagggagagcctcccacagttgaggccagatacaagtctttttcgataaaaatgctaaaagatatgaaagagggagtaaaacagtatggacccaactccccttatatgaggacattattagattccattgctcatggacatagactcattccttatgattgggagattctggcaaaatcgtctctctcaccctctcaatttttacaatttaagacttggtggattgatggggtacaagaacaggtccgaagaaatagggctgccaatcctccagttaacatagatgcagatcaactattaggaataggtcaaaattggagtactattagtcaacaagcattaatgcaaaatgaggccattgagcaagttagagctatctgccttagagcctgggaaaaaatccaagacccaggaagtacctgcccctcatttaatacagtaagacaaggttcaaaagagccctatcctgattttgtggcaaggctccaagatgttgctcaaaagtcaattgccgatgaaaaagcccgtaaggtcatagtggagttgatggcatatgaaaacgccaatcctgagtgtcaatcagccattaagccattaaaaggaaaggttcctgcaggatcagatgtaatctcagaatatgtaaaagcctgtgatggaatcggaggagctatgcataaagctatgcttatggctcaagcaataacaggagttgttttaggaggacaagttagaacatttggaggaaaatgttataattgtggtcaaattggtcacttaaaaaagaattgtccagtcttaaataaacagaatataactattcaagcaactacaacaggtagagagccacctgacttatgtccaagatgtaaaaaaggaaaacattgggctagtcaatgtcgttctaaatttgataaaaatgggcaaccattgtcgggaaatgagcaaaggggccagcctcaggccccacaacaaactggggcattcccaattcagccatttgttcctcagggttttcaggaacaacaacccccactgtcccaagtgtttcagggaataagccagttaccacaatacaacaattgtcccccgccacaagcggcagtgcagcagtagatttatatactatacaagcagtctctctgcttccaggggagcccccacaaaaaatccctacaggggtatatggcccactgcctgaggggactgtaggactaatcttgggaagatcaagtctaaatctaaaaggagttcaaattcatactagtgtggttgattcagactataaaggcgaaattcagttggttattagctcttcaattccttggagtgccagtccaggagacaggattgctcaattattactcctgccatatattaagggtggaaatagtgaaataaaaagaataggagggcttggaagcactgatccaacaggaaaggctgcatattgggcaagtcaggtctcagagaacagacctgtgtgtaaggccattattcaaggaaaacagtttgaagggttggtagacactggagcagatgtctctatcattgctttaaatcagtggccaaaaaattggcctaaacaaaaggctgttacaggacttgtcggcataggcacagcctcagaagtgtatcaaagtactgagattttacattgcttagggccagataatcaagaaagtactgttcagccaatgattacttcaattcctcttaatctgtggggtcgagatttattacaacaatggggtgcggaaatcaccatgcctgccccattatatagccccacgagtcaaaaaatcatgaccaagatgggatatataccaggaaagggactagggaaaaatgaagatggcattaaagttccagttgaggctaaaataaatcaagaaagagaaggaataggttatcctttttaggggcggccactgtagagcctcctaaacccataccactaacttggaaaacagaaaaaccggtgtgggtaaatcagtggccgctaccaaaacaaaaactggaggctttacatttattagcaaatgaacagttagaaaagggtcacattgagccttcgttctcaccttggaattctcctgtgtttgtaattcagaagaaatcaggcaaatggcgtatgttaactgacttaagggctgtaaacgccgtaattcaacccatggggcctctccaacctgggttgccctctccagccatgatcccaaaagattggcctttaattataattgatctaaaggattgcttttttaccatccctctggcagagcaggattgcgaaaaatttgcctttactataccagccataaataataaagaaccagccaccaggtttcagtggaaagtgttacctcagggaatgcttaatagtccaactatttgtcagacttttgtaggtcgagctcttcaaccagttagagaaaagttttcagactgttatattattcattatattgatgatattttatgtgctgcagaaacgagagataaattaattgactgttatacatttctgcaagcagaggttgccaatgctggactggcaatagcatctgataagatccaaacctctactccttttcattatttagggatgcagatagaaaatagaaaaattaagcaacaaaaaatagaaataagaaaagacacattaaaaacactaaatgattttcaaaaattactaggagatattaattggattcggccaactctaggcattcctacttatgccatgtcaaatttgttctctatcttaagaggagactcagacttaaatagtaaaagaatattaaccccagaggcaacaaaagaaattaaattagtggaagaaaaaattcagtcagcgcaaataaatagaatagatcccttagccccactccaacttttgatttttgccactgcacattctccaacaggtatcattattcaaaatactgatcttgtggagtggtcattccttcctcacagtacagttaagacttttacactgtacttggatcaaatagctacattaattggtcagacaagattacgaataataaaattatgtggaaatgacccagacaaaatagttgtccctttaaccaaggaacaagttagacaagcctttatcaattctggtgcatggcagattggtcttgctaattttgtgggaattattgataatcattacccaaaaacaaagatcttccagttcttaaaactgactacttggattctacctaaaattaccagacgtgaacctttagaaaatgctctaacagtatttactgatggttccagcaatggaaaagcagcttacacaggaccgaaagaacgagtaatcaaaactccatatcaatcggctcaaagagcagagttggttgcagtcattacagtgttacaagattttgaccaacctatcaatattatatcagattctgcatatgtagtacaggctacaagggatgttgagacagctctaattaaatatagcatggatgatcagttaaaccagctattcaatttattacaacaaactgtaagaaaaagaaatttcccattttatattactcatattcgagcacacactaatttaccagggcctttgactaaagcaaatgaacaagctgacttactggtatcatctgcactcataaaagcacaagaacttcatgctttgactcatgtaaatgcagcaggattaaaaaacaaatttgatgtcacatggaaacaggcaaaagatattgtacaacattgcacccagtgtcaaatcttacacctgcccactcaagaggcaggagttaatcccagaggtctgtgtcctaatgcattatggcaaatggatgtcacgcatgtaccttcatttggaagattatcatatgttcacgtaacagttgatacttattcacatttcatatgggcaacttgccaaacaggagaaagtacttcccatgttaaaaaacatttattgtcttgttttgctgtaatgggagttccagaaaaaatcaaaactgacaatggaccaggatattgtagtaaagctttccaaaaattcttaagtcagtggaaaatttcacatacaacaggaattccttataattcccaaggacaggccatagttgaaagaactaatagaacactcaaaactcaattagttaaacaaaaagaagggggagacagtaaggagtgtaccactcctcagatgcaacttaatctagcactctatactttaaattttttaaacatttatagaaatcagactactacttctgcagaacaacatcttactggtaaaaagaacagcccacatgaaggaaaactaatttggtggaaagataataaaaataagacatgggaaatagggaaggtgataacgtgggggagaggttttgcttgtgtttcaccaggagaaaatcagcttcctgtttggatacccactagacatttgaagttctacaatgaacccattggagatgcaaagaaaagggcctccacggagatggtaacac

SEQ ID NO: 1070 - DNA, 305 bp, Homo sapiens
  source 1..305: mol_type = other DNA
ggccgggcacggtggctcgcacctgtaatcccagcactttgggaggccgaggcgggtggatcacctgaggtctggaattcgagaccagcctggccaacatggtgaaacccatctctactgaaaatacaaaaaattagccgggcatgctcgtgggtgcctgtaatcccagctacttgggaggctgagggaggagaatcacttgaacctggagggcagaggttgcagtgagttgagatctcaccattgcactccagcccgggcaacaagagcgaaactccacctcaaaaaaaataaagtaaaataaa

SEQ ID NO: 1071 - DNA, 31 bp, Homo sapiens
  source 1..31: mol_type = other DNA
taggagtaaagagacttgaattctaatccca

SEQ ID NO: 1072 - DNA, 284 bp, Homo sapiens
  source 1..284: mol_type = other DNA
gccgggcgcagtggctcacgcctgtaatcccagtattttgggaggccgaggtggaaagatcgcttgagcccaggagttcaagaccagcctgggctacatgacgaaactccatctctatcaaaaatacaaaaaattaactaggtgtggtgctgcacgcctgtggtcccagctattcaggaggctgaggtgggaggatcatttgagcccagaggtagaggctgcagtgagccatgatcatgccactgcactctgggctgggtaacagagtgagatcctgtctcaaa

SEQ ID NO: 1073 - DNA, 291 bp, Homo sapiens
  source 1..291: mol_type = other DNA
ggctggacgtggtggctcacgcctgtaattccaacactctgggaggccgaggcaggtggatcacttgaggtcaggagttcgagaccagcctggccaacatggcgaaaccccgtgtcttctaaaaatacaaaatttagccaggtgtgatggcatgcgcctgtaatcccagctactcagaggctgaggtacgagaattgcttgaacctaggaggcagaggttgcagtgagccgagatcatgccactgcactccagcctgggtgacagagtgagattccatctcaaaaaaaaga

SEQ ID NO: 1074 - DNA, 137 bp, Homo sapiens
  source 1..137: mol_type = other DNA
tccttacctcccaacttagccatgccaagccaagagccaaagagctggtgctatagccatatagatcttggttagacatggagaaggacttcccaagacaggaataagcaagatcatggaatttcctggttggagag

SEQ ID NO: 1075 - DNA, 145 bp, Homo sapiens
  source 1..145: mol_type = other DNA
gaaagggccaggctgaaattcaggagcctggatcttggcatttccgctaaccagctgggcaacctgctcacacctcttctactcccatgggatctgtaaaatgaggaatataggaatgatgatatctaaggctcatttcagctct

SEQ ID NO: 1076 - DNA, 57 bp, Homo sapiens
  source 1..57: mol_type = other DNA
caaaggaaaacactgtagttaacttctttctggcttgggatgttcttcaccaaggag

SEQ ID NO: 1077 - DNA, 207 bp, Homo sapiens
  source 1..207: mol_type = other DNA
ttctaacacttatgcatttattttcatgtgtaagaagaaaaacgtaactagcacgtgaacatgactgcatggatacacggctcagcacgaggctaaagtcagaagtgagtgaaaacaaaatagcatgttgatttaagtgaaataacagaacaggaggcctttggttataacaattgtggaggtggtctgtgaatgcagaagttcggg

SEQ ID NO: 1078 - DNA, 304 bp, Homo sapiens
  source 1..304: mol_type = other DNA
ggccggacgcggtagctcacgcctgtaatcccagcactttgggaggcagaggcgggtggatcacgaggtcaggagatcgagaccatcctggctaacacagtgaaaccccgtctctactaaaaatagaaaaaattagccgggcatggtggggggcgcctgttgtcccagctactcaggaggctgaggtaggagaatcgtttgaacctgggaggcggaggttgcagtgagctgagatcatgccactgcactccagcgtgggcgacagagcaagactccgtctcaaaaaaaaaaaaaaaaaaaaaaa

SEQ ID NO: 1079 - DNA, 309 bp, Homo sapiens
  source 1..309: mol_type = other DNA
ggctgggttcagtggctcatgcctgtaatcctagcactttgggaggctgaggtgggtggataagctgaggtcaggagttcgagaccacctggccaccatggcgaaaccctgtctctactaaaaatataaaaaattagccgggcgtagtggcgggcgcctgtagtcccagctacttgggaggctgaggcaggagaatggcgtgaacccgggaggcggagcttgcagtgagccgagatcccgccactgcactccagcctgggcgacagagcgagactccgtctcaaaaaaaaaaaaaaaaaaaaaaagaaa

SEQ ID NO: 1080 - DNA, 344 bp, Homo sapiens
  source 1..344: mol_type = other DNA
atgctgttaatctataaccttacccccaaccccgtgctctctgaaacatgtgttgtgtccactcagggttaaatggattaagggcggtgcaagatgtgctttgttaaacagatgcttgaaggcagcacgctcgttaagagtcatcaccactccctaatctcaagtacccagggacacaaagactgcggaaggaaggccgcagggacctctgcctaggaaaaccagagacctttgttcacgggtttatctgctgaccttctctccactattatcctatgaccctgccacatgcccctctccgagaaacacccaagaatgatcaataaatactaaaaaaaaaaaaa

SEQ ID NO: 1081 - DNA, 344 bp, Homo sapiens; identical to SEQ ID NO: 1080
  source 1..344: mol_type = other DNA

SEQ ID NO: 1082 - DNA, 344 bp, Homo sapiens; identical to SEQ ID NO: 1080
  source 1..344: mol_type = other DNA

SEQ ID NO: 1083 - DNA, 344 bp, Homo sapiens; identical to SEQ ID NO: 1080
  source 1..344: mol_type = other DNA

SEQ ID NO: 1084 - DNA, 344 bp, Homo sapiens; identical to SEQ ID NO: 1080
  source 1..344: mol_type = other DNA

SEQ ID NO: 1085 - DNA, 344 bp, Homo sapiens; identical to SEQ ID NO: 1080
  source 1..344: mol_type = other DNA

SEQ ID NO: 1086 - DNA, 344 bp, Homo sapiens; identical to SEQ ID NO: 1080
  source 1..344: mol_type = other DNA

SEQ ID NO: 1087 - DNA, 344 bp, Homo sapiens; identical to SEQ ID NO: 1080
  source 1..344: mol_type = other DNA

SEQ ID NO: 1088 - DNA, 344 bp, Homo sapiens; identical to SEQ ID NO: 1080
  source 1..344: mol_type = other DNA

SEQ ID NO: 1089 - DNA, 344 bp, Homo sapiens; identical to SEQ ID NO: 1080
  source 1..344: mol_type = other DNA

SEQ ID NO: 1090 - DNA, 344 bp, Homo sapiens; identical to SEQ ID NO: 1080
  source 1..344: mol_type = other DNA

SEQ ID NO: 1091 - DNA, 344 bp, Homo sapiens; identical to SEQ ID NO: 1080
  source 1..344: mol_type = other DNA

SEQ ID NO: 1092 - DNA, 344 bp, Homo sapiens; identical to SEQ ID NO: 1080
  source 1..344: mol_type = other DNA

SEQ ID NO: 1093 - DNA, 344 bp, Homo sapiens; identical to SEQ ID NO: 1080
  source 1..344: mol_type = other DNA

SEQ ID NO: 1094 - DNA, 344 bp, Homo sapiens; identical to SEQ ID NO: 1080
  source 1..344: mol_type = other DNA

SEQ ID NO: 1095 - DNA, 344 bp, Homo sapiens; identical to SEQ ID NO: 1080
  source 1..344: mol_type = other DNA

SEQ ID NO: 1096 - DNA, 344 bp, Homo sapiens; identical to SEQ ID NO: 1080
  source 1..344: mol_type = other DNA

SEQ ID NO: 1097 - DNA, 344 bp, Homo sapiens; identical to SEQ ID NO: 1080
  source 1..344: mol_type = other DNA

SEQ ID NO: 1098 - DNA, 344 bp, Homo sapiens; identical to SEQ ID NO: 1080
  source 1..344: mol_type = other DNA

SEQ ID NO: 1099 - DNA, 344 bp, Homo sapiens; identical to SEQ ID NO: 1080
  source 1..344: mol_type = other DNA

SEQ ID NO: 1100 - DNA, 344 bp, Homo sapiens; identical to SEQ ID NO: 1080
  source 1..344: mol_type = other DNA

SEQ ID NO: 1101 - DNA, 344 bp, Homo sapiens; identical to SEQ ID NO: 1080
  source 1..344: mol_type = other DNA

SEQ ID NO: 1102 - DNA, 344 bp, Homo sapiens; identical to SEQ ID NO: 1080
  source 1..344: mol_type = other DNA

SEQ ID NO: 1103 - DNA, 344 bp, Homo sapiens; identical to SEQ ID NO: 1080
  source 1..344: mol_type = other DNA

SEQ ID NO: 1104 - DNA, 344 bp, Homo sapiens; identical to SEQ ID NO: 1080
  source 1..344: mol_type = other DNA

SEQ ID NO: 1105 - DNA, 344 bp, Homo sapiens; identical to SEQ ID NO: 1080
  source 1..344: mol_type = other DNA

SEQ ID NO: 1106 - DNA, 344 bp, Homo sapiens; identical to SEQ ID NO: 1080
  source 1..344: mol_type = other DNA

SEQ ID NO: 1107 - DNA, 344 bp, Homo sapiens; identical to SEQ ID NO: 1080
  source 1..344: mol_type = other DNA

SEQ ID NO: 1108 - DNA, 344 bp, Homo sapiens; identical to SEQ ID NO: 1080
  source 1..344: mol_type = other DNA

SEQ ID NO: 1109 - DNA, 344 bp, Homo sapiens; identical to SEQ ID NO: 1080
  source 1..344: mol_type = other DNA

SEQ ID NO: 1110 - DNA, 344 bp, Homo sapiens; identical to SEQ ID NO: 1080
  source 1..344: mol_type = other DNA

SEQ ID NO: 1111 - DNA, 344 bp, Homo sapiens; identical to SEQ ID NO: 1080
  source 1..344: mol_type = other DNA

SEQ ID NO: 1112 - DNA, 344 bp, Homo sapiens; identical to SEQ ID NO: 1080
  source 1..344: mol_type = other DNA

SEQ ID NO: 1113 - DNA, 344 bp, Homo sapiens; identical to SEQ ID NO: 1080
  source 1..344: mol_type = other DNA

SEQ ID NO: 1114 - DNA, 344 bp, Homo sapiens; identical to SEQ ID NO: 1080
  source 1..344: mol_type = other DNA

SEQ ID NO: 1115 - DNA, 344 bp, Homo sapiens; identical to SEQ ID NO: 1080
  source 1..344: mol_type = other DNA

SEQ ID NO: 1116 - DNA, 344 bp, Homo sapiens; identical to SEQ ID NO: 1080
  source 1..344: mol_type = other DNA

SEQ ID NO: 1117 - DNA, 344 bp, Homo sapiens; identical to SEQ ID NO: 1080
  source 1..344: mol_type = other DNA

SEQ ID NO: 1118 - DNA, 344 bp, Homo sapiens; identical to SEQ ID NO: 1080
  source 1..344: mol_type = other DNA

SEQ ID NO: 1119 - DNA, 344 bp, Homo sapiens; identical to SEQ ID NO: 1080
  source 1..344: mol_type = other DNA

SEQ ID NO: 1120 - DNA, 344 bp, Homo sapiens; identical to SEQ ID NO: 1080
  source 1..344: mol_type = other DNA

SEQ ID NO: 1121 - DNA, 344 bp, Homo sapiens; identical to SEQ ID NO: 1080
  source 1..344: mol_type = other DNA

SEQ ID NO: 1122 - DNA, 344 bp, Homo sapiens; identical to SEQ ID NO: 1080
  source 1..344: mol_type = other DNA

SEQ ID NO: 1123 - DNA, 344 bp, Homo sapiens; identical to SEQ ID NO: 1080
  source 1..344: mol_type = other DNA

SEQ ID NO: 1124 - DNA, 344 bp, Homo sapiens; identical to SEQ ID NO: 1080
  source 1..344: mol_type = other DNA

SEQ ID NO: 1125 - DNA, 344 bp, Homo sapiens; identical to SEQ ID NO: 1080
  source 1..344: mol_type = other DNA

SEQ ID NO: 1126 - DNA, 344 bp, Homo sapiens; identical to SEQ ID NO: 1080
  source 1..344: mol_type = other DNA

SEQ ID NO: 1127 - DNA, 344 bp, Homo sapiens; identical to SEQ ID NO: 1080
  source 1..344: mol_type = other DNA

SEQ ID NO: 1128 - DNA, 344 bp, Homo sapiens; identical to SEQ ID NO: 1080
  source 1..344: mol_type = other DNA

SEQ ID NO: 1129 - DNA, 344 bp, Homo sapiens; identical to SEQ ID NO: 1080
  source 1..344: mol_type = other DNA

SEQ ID NO: 1130 - DNA, 344 bp, Homo sapiens; identical to SEQ ID NO: 1080
  source 1..344: mol_type = other DNA

SEQ ID NO: 1131 - DNA, 344 bp, Homo sapiens; identical to SEQ ID NO: 1080
  source 1..344: mol_type = other DNA

SEQ ID NO: 1132 - DNA, 344 bp, Homo sapiens; identical to SEQ ID NO: 1080
  source 1..344: mol_type = other DNA

SEQ ID NO: 1133 - DNA, 344 bp, Homo sapiens; identical to SEQ ID NO: 1080
  source 1..344: mol_type = other DNA

SEQ ID NO: 1134 - DNA, 344 bp, Homo sapiens; identical to SEQ ID NO: 1080
  source 1..344: mol_type = other DNA

SEQ ID NO: 1135 - DNA, 344 bp, Homo sapiens; identical to SEQ ID NO: 1080
  source 1..344: mol_type = other DNA

SEQ ID NO: 1136 - DNA, 344 bp, Homo sapiens; identical to SEQ ID NO: 1080
  source 1..344: mol_type = other DNA

SEQ ID NO: 1137 - DNA, 344 bp, Homo sapiens; identical to SEQ ID NO: 1080
  source 1..344: mol_type = other DNA

SEQ ID NO: 1138 - DNA, 344 bp, Homo sapiens; identical to SEQ ID NO: 1080
  source 1..344: mol_type = other DNA

SEQ ID NO: 1139 - DNA, 344 bp, Homo sapiens; identical to SEQ ID NO: 1080
  source 1..344: mol_type = other DNA

SEQ ID NO: 1140 - DNA, 344 bp, Homo sapiens; identical to SEQ ID NO: 1080
  source 1..344: mol_type = other DNA

SEQ ID NO: 1141 - DNA, 344 bp, Homo sapiens; identical to SEQ ID NO: 1080
  source 1..344: mol_type = other DNA

SEQ ID NO: 1142 - DNA, 344 bp, Homo sapiens; identical to SEQ ID NO: 1080
  source 1..344: mol_type = other DNA

SEQ ID NO: 1143 - DNA, 344 bp, Homo sapiens; identical to SEQ ID NO: 1080
  source 1..344: mol_type = other DNA

SEQ ID NO: 1144 - DNA, 344 bp, Homo sapiens; identical to SEQ ID NO: 1080
  source 1..344: mol_type = other DNA

SEQ ID NO: 1145 - DNA, 344 bp, Homo sapiens; identical to SEQ ID NO: 1080
  source 1..344: mol_type = other DNA

SEQ ID NO: 1146 - DNA, 344 bp, Homo sapiens; identical to SEQ ID NO: 1080
  source 1..344: mol_type = other DNA

SEQ ID NO: 1147 - DNA, 344 bp, Homo sapiens; identical to SEQ ID NO: 1080
  source 1..344: mol_type = other DNA

SEQ ID NO: 1148 - DNA, 344 bp, Homo sapiens; identical to SEQ ID NO: 1080
  source 1..344: mol_type = other DNA

SEQ ID NO: 1149 - DNA, 344 bp, Homo sapiens; identical to SEQ ID NO: 1080
  source 1..344: mol_type = other DNA

SEQ ID NO: 1150 - DNA, 344 bp, Homo sapiens; identical to SEQ ID NO: 1080
  source 1..344: mol_type = other DNA

SEQ ID NO: 1151 - DNA, 344 bp, Homo sapiens; identical to SEQ ID NO: 1080
  source 1..344: mol_type = other DNA

SEQ ID NO: 1152 - DNA, 344 bp, Homo sapiens; identical to SEQ ID NO: 1080
  source 1..344: mol_type = other DNA

SEQ ID NO: 1153 - DNA, 344 bp, Homo sapiens; identical to SEQ ID NO: 1080
  source 1..344: mol_type = other DNA

SEQ ID NO: 1154 - DNA, 344 bp, Homo sapiens; identical to SEQ ID NO: 1080
  source 1..344: mol_type = other DNA

SEQ ID NO: 1155 - DNA, 344 bp, Homo sapiens; identical to SEQ ID NO: 1080
  source 1..344: mol_type = other DNA

SEQ ID NO: 1156 - DNA, 344 bp, Homo sapiens; identical to SEQ ID NO: 1080
  source 1..344: mol_type = other DNA

SEQ ID NO: 1157 - DNA, 344 bp, Homo sapiens; identical to SEQ ID NO: 1080
  source 1..344: mol_type = other DNA

SEQ ID NO: 1158 - DNA, 344 bp, Homo sapiens; identical to SEQ ID NO: 1080
  source 1..344: mol_type = other DNA

SEQ ID NO: 1159 - DNA, 344 bp, Homo sapiens; identical to SEQ ID NO: 1080
  source 1..344: mol_type = other DNA

SEQ ID NO: 1160 - DNA, 344 bp, Homo sapiens; identical to SEQ ID NO: 1080
  source 1..344: mol_type = other DNA

SEQ ID NO: 1161 - DNA, 344 bp, Homo sapiens; identical to SEQ ID NO: 1080
  source 1..344: mol_type = other DNA

SEQ ID NO: 1162 - DNA, 344 bp, Homo sapiens; identical to SEQ ID NO: 1080
  source 1..344: mol_type = other DNA

SEQ ID NO: 1163 - DNA, 344 bp, Homo sapiens; identical to SEQ ID NO: 1080
  source 1..344: mol_type = other DNA

SEQ ID NO: 1164 - DNA, 344 bp, Homo sapiens; identical to SEQ ID NO: 1080
  source 1..344: mol_type = other DNA

SEQ ID NO: 1165 - DNA, 344 bp, Homo sapiens; identical to SEQ ID NO: 1080
  source 1..344: mol_type = other DNA

SEQ ID NO: 1166 - DNA, 344 bp, Homo sapiens; identical to SEQ ID NO: 1080
  source 1..344: mol_type = other DNA

SEQ ID NO: 1167 - DNA, 344 bp, Homo sapiens; identical to SEQ ID NO: 1080
  source 1..344: mol_type = other DNA

SEQ ID NO: 1168 - DNA, 344 bp, Homo sapiens; identical to SEQ ID NO: 1080
  source 1..344: mol_type = other DNA

SEQ ID NO: 1169 - DNA, 344 bp, Homo sapiens; identical to SEQ ID NO: 1080
  source 1..344: mol_type = other DNA

SEQ ID NO: 1170 - DNA, 344 bp, Homo sapiens; identical to SEQ ID NO: 1080
  source 1..344: mol_type = other DNA

SEQ ID NO: 1171 - DNA, 344 bp, Homo sapiens; identical to SEQ ID NO: 1080
  source 1..344: mol_type = other DNA

SEQ ID NO: 1172 - DNA, 344 bp, Homo sapiens; identical to SEQ ID NO: 1080
  source 1..344: mol_type = other DNA

SEQ ID NO: 1173 - DNA, 344 bp, Homo sapiens; identical to SEQ ID NO: 1080
  source 1..344: mol_type = other DNA

SEQ ID NO: 1174 - DNA, 344 bp, Homo sapiens; identical to SEQ ID NO: 1080
  source 1..344: mol_type = other DNA

SEQ ID NO: 1175 - DNA, 344 bp, Homo sapiens; identical to SEQ ID NO: 1080
  source 1..344: mol_type = other DNA

SEQ ID NO: 1176 - DNA, 344 bp, Homo sapiens; identical to SEQ ID NO: 1080
  source 1..344: mol_type = other DNA

SEQ ID NO: 1177 - DNA, 344 bp, Homo sapiens; identical to SEQ ID NO: 1080
  source 1..344: mol_type = other DNA

SEQ ID NO: 1178 - DNA, 344 bp, Homo sapiens; identical to SEQ ID NO: 1080
  source 1..344: mol_type = other DNA

SEQ ID NO: 1179 - DNA, 344 bp, Homo sapiens; identical to SEQ ID NO: 1080
  source 1..344: mol_type = other DNA

SEQ ID NO: 1180 - DNA, 344 bp, Homo sapiens; identical to SEQ ID NO: 1080
  source 1..344: mol_type = other DNA

SEQ ID NO: 1181 - DNA, 344 bp, Homo sapiens; identical to SEQ ID NO: 1080
  source 1..344: mol_type = other DNA

SEQ ID NO: 1182 - DNA, 344 bp, Homo sapiens; identical to SEQ ID NO: 1080
  source 1..344: mol_type = other DNA

SEQ ID NO: 1183 - DNA, 344 bp, Homo sapiens; identical to SEQ ID NO: 1080
  source 1..344: mol_type = other DNA

SEQ ID NO: 1184 - DNA, 344 bp, Homo sapiens; identical to SEQ ID NO: 1080
  source 1..344: mol_type = other DNA

SEQ ID NO: 1185 - DNA, 344 bp, Homo sapiens; identical to SEQ ID NO: 1080
  source 1..344: mol_type = other DNA

SEQ ID NO: 1186 - DNA, 344 bp, Homo sapiens; identical to SEQ ID NO: 1080
  source 1..344: mol_type = other DNA

SEQ ID NO: 1187 - DNA, 344 bp, Homo sapiens; identical to SEQ ID NO: 1080
  source 1..344: mol_type = other DNA

SEQ ID NO: 1188 - DNA, 344 bp, Homo sapiens; identical to SEQ ID NO: 1080
  source 1..344: mol_type = other DNA

SEQ ID NO: 1189 - DNA, 344 bp, Homo sapiens; identical to SEQ ID NO: 1080
  source 1..344: mol_type = other DNA

SEQ ID NO: 1190 - DNA, 344 bp, Homo sapiens; identical to SEQ ID NO: 1080
  source 1..344: mol_type = other DNA

SEQ ID NO: 1191 - DNA, 344 bp, Homo sapiens; identical to SEQ ID NO: 1080
  source 1..344: mol_type = other DNA

SEQ ID NO: 1192 - DNA, 344 bp, Homo sapiens; identical to SEQ ID NO: 1080
  source 1..344: mol_type = other DNA

SEQ ID NO: 1193 - DNA, 344 bp, Homo sapiens; identical to SEQ ID NO: 1080
  source 1..344: mol_type = other DNA

SEQ ID NO: 1194 - DNA, 344 bp, Homo sapiens; identical to SEQ ID NO: 1080
  source 1..344: mol_type = other DNA

SEQ ID NO: 1195 - DNA, 344 bp, Homo sapiens; identical to SEQ ID NO: 1080
  source 1..344: mol_type = other DNA

SEQ ID NO: 1196 - DNA, 344 bp, Homo sapiens; identical to SEQ ID NO: 1080
  source 1..344: mol_type = other DNA

SEQ ID NO: 1197 - DNA, 344 bp, Homo sapiens; identical to SEQ ID NO: 1080
  source 1..344: mol_type = other DNA

SEQ ID NO: 1198 - DNA, 344 bp, Homo sapiens; identical to SEQ ID NO: 1080
  source 1..344: mol_type = other DNA

SEQ ID NO: 1199 - DNA, 344 bp, Homo sapiens; identical to SEQ ID NO: 1080
  source 1..344: mol_type = other DNA

SEQ ID NO: 1200 - DNA, 344 bp, Homo sapiens; identical to SEQ ID NO: 1080
  source 1..344: mol_type = other DNA

SEQ ID NO: 1201 - DNA, 344 bp, Homo sapiens; identical to SEQ ID NO: 1080
  source 1..344: mol_type = other DNA

SEQ ID NO: 1202 - DNA, 344 bp, Homo sapiens; identical to SEQ ID NO: 1080
  source 1..344: mol_type = other DNA

SEQ ID NO: 1203 - DNA, 344 bp, Homo sapiens; identical to SEQ ID NO: 1080
  source 1..344: mol_type = other DNA

SEQ ID NO: 1204 - DNA, 344 bp, Homo sapiens; identical to SEQ ID NO: 1080
  source 1..344: mol_type = other DNA

SEQ ID NO: 1205 - DNA, 344 bp, Homo sapiens; identical to SEQ ID NO: 1080
  source 1..344: mol_type = other DNA

SEQ ID NO: 1206 - DNA, 344 bp, Homo sapiens; identical to SEQ ID NO: 1080
  source 1..344: mol_type = other DNA

SEQ ID NO: 1207 - DNA, 344 bp, Homo sapiens; identical to SEQ ID NO: 1080
  source 1..344: mol_type = other DNA

SEQ ID NO: 1208 - DNA, 344 bp, Homo sapiens; identical to SEQ ID NO: 1080
  source 1..344: mol_type = other DNA

SEQ ID NO: 1209 - DNA, 344 bp, Homo sapiens; identical to SEQ ID NO: 1080
  source 1..344: mol_type = other DNA

SEQ ID NO: 1210 - DNA, 344 bp, Homo sapiens; identical to SEQ ID NO: 1080
  source 1..344: mol_type = other DNA

SEQ ID NO: 1211 - DNA, 344 bp, Homo sapiens; identical to SEQ ID NO: 1080
  source 1..344: mol_type = other DNA

SEQ ID NO: 1212 - DNA, 344 bp, Homo sapiens; identical to SEQ ID NO: 1080
  source 1..344: mol_type = other DNA

SEQ ID NO: 1213 - DNA, 344 bp, Homo sapiens; identical to SEQ ID NO: 1080
  source 1..344: mol_type = other DNA

SEQ ID NO: 1214 - DNA, 344 bp, Homo sapiens; identical to SEQ ID NO: 1080
  source 1..344: mol_type = other DNA

SEQ ID NO: 1215 - DNA, 344 bp, Homo sapiens; identical to SEQ ID NO: 1080
  source 1..344: mol_type = other DNA

SEQ ID NO: 1216 - DNA, 344 bp, Homo sapiens; identical to SEQ ID NO: 1080
  source 1..344: mol_type = other DNA

SEQ ID NO: 1217 - DNA, 344 bp, Homo sapiens; identical to SEQ ID NO: 1080
  source 1..344: mol_type = other DNA

SEQ ID NO: 1218 - DNA, 344 bp, Homo sapiens; identical to SEQ ID NO: 1080
  source 1..344: mol_type = other DNA

SEQ ID NO: 1219 - DNA, 344 bp, Homo sapiens; identical to SEQ ID NO: 1080
  source 1..344: mol_type = other DNA

SEQ ID NO: 1220 - DNA, 344 bp, Homo sapiens; identical to SEQ ID NO: 1080
  source 1..344: mol_type = other DNA

SEQ ID NO: 1221 - DNA, 344 bp, Homo sapiens; identical to SEQ ID NO: 1080
  source 1..344: mol_type = other DNA

SEQ ID NO: 1222 - DNA, 344 bp, Homo sapiens; identical to SEQ ID NO: 1080
  source 1..344: mol_type = other DNA

SEQ ID NO: 1223 - DNA, 344 bp, Homo sapiens; identical to SEQ ID NO: 1080
  source 1..344: mol_type = other DNA

SEQ ID NO: 1224 - DNA, 344 bp, Homo sapiens; identical to SEQ ID NO: 1080
  source 1..344: mol_type = other DNA

SEQ ID NO: 1225 - DNA, 344 bp, Homo sapiens; identical to SEQ ID NO: 1080
  source 1..344: mol_type = other DNA

SEQ ID NO: 1226 - DNA, 344 bp, Homo sapiens; identical to SEQ ID NO: 1080
  source 1..344: mol_type = other DNA

SEQ ID NO: 1227 - DNA, 344 bp, Homo sapiens; identical to SEQ ID NO: 1080
  source 1..344: mol_type = other DNA

SEQ ID NO: 1228 - DNA, 344 bp, Homo sapiens; identical to SEQ ID NO: 1080
  source 1..344: mol_type = other DNA

SEQ ID NO: 1229 - DNA, 344 bp, Homo sapiens; identical to SEQ ID NO: 1080
  source 1..344: mol_type = other DNA

SEQ ID NO: 1230 - DNA, 344 bp, Homo sapiens; identical to SEQ ID NO: 1080
  source 1..344: mol_type = other DNA

SEQ ID NO: 1231 - DNA, 344 bp, Homo sapiens; identical to SEQ ID NO: 1080
  source 1..344: mol_type = other DNA

SEQ ID NO: 1232 - DNA, 344 bp, Homo sapiens; identical to SEQ ID NO: 1080
  source 1..344: mol_type = other DNA

SEQ ID NO: 1233 - DNA, 344 bp, Homo sapiens; identical to SEQ ID NO: 1080
  source 1..344: mol_type = other DNA

SEQ ID NO: 1234 - DNA, 344 bp, Homo sapiens; identical to SEQ ID NO: 1080
  source 1..344: mol_type = other DNA

SEQ ID NO: 1235 - DNA, 344 bp, Homo sapiens; identical to SEQ ID NO: 1080
  source 1..344: mol_type = other DNA

SEQ ID NO: 1236 - DNA, 344 bp, Homo sapiens; identical to SEQ ID NO: 1080
  source 1..344: mol_type = other DNA

SEQ ID NO: 1237 - DNA, 344 bp, Homo sapiens; identical to SEQ ID NO: 1080
  source 1..344: mol_type = other DNA

SEQ ID NO: 1238 - DNA, 344 bp, Homo sapiens; identical to SEQ ID NO: 1080
  source 1..344: mol_type = other DNA

SEQ ID NO: 1239 - DNA, 344 bp, Homo sapiens; identical to SEQ ID NO: 1080
  source 1..344: mol_type = other DNA

SEQ ID NO: 1240 - DNA, 344 bp, Homo sapiens; identical to SEQ ID NO: 1080
  source 1..344: mol_type = other DNA

SEQ ID NO: 1241 - DNA, 344 bp, Homo sapiens; identical to SEQ ID NO: 1080
  source 1..344: mol_type = other DNA

SEQ ID NO: 1242 - DNA, 344 bp, Homo sapiens; identical to SEQ ID NO: 1080
  source 1..344: mol_type = other DNA

SEQ ID NO: 1243 - DNA, 344 bp, Homo sapiens; identical to SEQ ID NO: 1080
  source 1..344: mol_type = other DNA

SEQ ID NO: 1244 - DNA, 344 bp, Homo sapiens; identical to SEQ ID NO: 1080
  source 1..344: mol_type = other DNA

SEQ ID NO: 1245 - DNA, 344 bp, Homo sapiens; identical to SEQ ID NO: 1080
  source 1..344: mol_type = other DNA

SEQ ID NO: 1246 - DNA, 344 bp, Homo sapiens; identical to SEQ ID NO: 1080
  source 1..344: mol_type = other DNA

SEQ ID NO: 1247 - DNA, 344 bp, Homo sapiens; identical to SEQ ID NO: 1080
  source 1..344: mol_type = other DNA

SEQ ID NO: 1248 - DNA, 344 bp, Homo sapiens; identical to SEQ ID NO: 1080
  source 1..344: mol_type = other DNA

SEQ ID NO: 1249 - DNA, 344 bp, Homo sapiens; identical to SEQ ID NO: 1080
  source 1..344: mol_type = other DNA

SEQ ID NO: 1250 - DNA, 344 bp, Homo sapiens; identical to SEQ ID NO: 1080
  source 1..344: mol_type = other DNA

SEQ ID NO: 1251 - DNA, 344 bp, Homo sapiens; identical to SEQ ID NO: 1080
  source 1..344: mol_type = other DNA

SEQ ID NO: 1252 - DNA, 344 bp, Homo sapiens; identical to SEQ ID NO: 1080
  source 1..344: mol_type = other DNA

SEQ ID NO: 1253 - DNA, 344 bp, Homo sapiens; identical to SEQ ID NO: 1080
  source 1..344: mol_type = other DNA

SEQ ID NO: 1254 - DNA, 344 bp, Homo sapiens; identical to SEQ ID NO: 1080
  source 1..344: mol_type = other DNA

SEQ ID NO: 1255 - DNA, 344 bp, Homo sapiens; identical to SEQ ID NO: 1080
  source 1..344: mol_type = other DNA

SEQ ID NO: 1256 - DNA, 344 bp, Homo sapiens; identical to SEQ ID NO: 1080
  source 1..344: mol_type = other DNA

SEQ ID NO: 1257 - DNA, 344 bp, Homo sapiens; identical to SEQ ID NO: 1080
  source 1..344: mol_type = other DNA

SEQ ID NO: 1258 - DNA, 344 bp, Homo sapiens; identical to SEQ ID NO: 1080
  source 1..344: mol_type = other DNA

SEQ ID NO: 1259 - DNA, 344 bp, Homo sapiens; identical to SEQ ID NO: 1080
  source 1..344: mol_type = other DNA

SEQ ID NO: 1260 - DNA, 344 bp, Homo sapiens; identical to SEQ ID NO: 1080
  source 1..344: mol_type = other DNA

SEQ ID NO: 1261 - DNA, 344 bp, Homo sapiens; identical to SEQ ID NO: 1080
  source 1..344: mol_type = other DNA

SEQ ID NO: 1262 - DNA, 344 bp, Homo sapiens; identical to SEQ ID NO: 1080
  source 1..344: mol_type = other DNA

SEQ ID NO: 1263 - DNA, 344 bp, Homo sapiens; identical to SEQ ID NO: 1080
  source 1..344: mol_type = other DNA

SEQ ID NO: 1264 - DNA, 344 bp, Homo sapiens; identical to SEQ ID NO: 1080
  source 1..344: mol_type = other DNA

SEQ ID NO: 1265 - DNA, 344 bp, Homo sapiens; identical to SEQ ID NO: 1080
  source 1..344: mol_type = other DNA

SEQ ID NO: 1266 - DNA, 344 bp, Homo sapiens; identical to SEQ ID NO: 1080
  source 1..344: mol_type = other DNA

SEQ ID NO: 1267 - DNA, 344 bp, Homo sapiens; identical to SEQ ID NO: 1080
  source 1..344: mol_type = other DNA

SEQ ID NO: 1268 - DNA, 344 bp, Homo sapiens; identical to SEQ ID NO: 1080
  source 1..344: mol_type = other DNA

SEQ ID NO: 1269 - DNA, 344 bp, Homo sapiens; identical to SEQ ID NO: 1080
  source 1..344: mol_type = other DNA

SEQ ID NO: 1270 - DNA, 344 bp, Homo sapiens; identical to SEQ ID NO: 1080
  source 1..344: mol_type = other DNA

SEQ ID NO: 1271 - DNA, 344 bp, Homo sapiens; identical to SEQ ID NO: 1080
  source 1..344: mol_type = other DNA

SEQ ID NO: 1272 - DNA, 344 bp, Homo sapiens; identical to SEQ ID NO: 1080
  source 1..344: mol_type = other DNA

SEQ ID NO: 1273 - DNA, 344 bp, Homo sapiens; identical to SEQ ID NO: 1080
  source 1..344: mol_type = other DNA

SEQ ID NO: 1274 - DNA, 344 bp, Homo sapiens; identical to SEQ ID NO: 1080
  source 1..344: mol_type = other DNA

SEQ ID NO: 1275 - DNA, 344 bp, Homo sapiens; identical to SEQ ID NO: 1080
  source 1..344: mol_type = other DNA

SEQ ID NO: 1276 - DNA, 344 bp, Homo sapiens; identical to SEQ ID NO: 1080
  source 1..344: mol_type = other DNA

SEQ ID NO: 1277 - DNA, 344 bp, Homo sapiens; identical to SEQ ID NO: 1080
  source 1..344: mol_type = other DNA

SEQ ID NO: 1278 - DNA, 344 bp, Homo sapiens; identical to SEQ ID NO: 1080
  source 1..344: mol_type = other DNA

SEQ ID NO: 1279 - DNA, 344 bp, Homo sapiens; identical to SEQ ID NO: 1080
  source 1..344: mol_type = other DNA

SEQ ID NO: 1280 - DNA, 346 bp, Homo sapiens
  source 1..346: mol_type = other DNA
atgctgttaatctataaccttacccccaaccccgtgctctctgaaacatgtgttgtgtccactcagggttaaatggattaagggcggtgcaagatgtgctttgttaaacagatgcttgaaggcagcacgctcgttaagagtcatcaccactccctaatctcaagtacaaccagggacacaaagactgcggaaggaaggccgcagggacctctgcctaggaaaaccagagacctttgttcacgggtttatctgctgaccttctctccactattatcctatgaccctgccacatgcccctctccgagaaacacccaagaatgatcaataaatactaaaaaaaaaaaaa

SEQ ID NO: 1281 - DNA, 344 bp, Homo sapiens; identical to SEQ ID NO: 1080
  source 1..344: mol_type = other DNA

SEQ ID NO: 1282 - DNA, 344 bp, Homo sapiens; identical to SEQ ID NO: 1080
  source 1..344: mol_type = other DNA

SEQ ID NO: 1283 - DNA, 344 bp, Homo sapiens; identical to SEQ ID NO: 1080
  source 1..344: mol_type = other DNA

SEQ ID NO: 1284 - DNA, 344 bp, Homo sapiens; identical to SEQ ID NO: 1080
  source 1..344: mol_type = other DNA

SEQ ID NO: 1285 - DNA, 344 bp, Homo sapiens; identical to SEQ ID NO: 1080
  source 1..344: mol_type = other DNA

SEQ ID NO: 1286 - DNA, 344 bp, Homo sapiens; identical to SEQ ID NO: 1080
  source 1..344: mol_type = other DNA

SEQ ID NO: 1287 - DNA, 344 bp, Homo sapiens; identical to SEQ ID NO: 1080
  source 1..344: mol_type = other DNA

SEQ ID NO: 1288 - DNA, 344 bp, Homo sapiens; identical to SEQ ID NO: 1080
  source 1..344: mol_type = other DNA

SEQ ID NO: 1289 - DNA, 344 bp, Homo sapiens; identical to SEQ ID NO: 1080
  source 1..344: mol_type = other DNA

SEQ ID NO: 1290 - DNA, 344 bp, Homo sapiens; identical to SEQ ID NO: 1080
  source 1..344: mol_type = other DNA

SEQ ID NO: 1291 - DNA, 344 bp, Homo sapiens; identical to SEQ ID NO: 1080
  source 1..344: mol_type = other DNA

SEQ ID NO: 1292 - DNA, 344 bp, Homo sapiens; identical to SEQ ID NO: 1080
  source 1..344: mol_type = other DNA

SEQ ID NO: 1293 - DNA, 344 bp, Homo sapiens; identical to SEQ ID NO: 1080
  source 1..344: mol_type = other DNA

SEQ ID NO: 1294 - DNA, 344 bp, Homo sapiens; identical to SEQ ID NO: 1080
  source 1..344: mol_type = other DNA

SEQ ID NO: 1295 - DNA, 344 bp, Homo sapiens; identical to SEQ ID NO: 1080
  source 1..344: mol_type = other DNA

SEQ ID NO: 1296 - DNA, 344 bp, Homo sapiens; identical to SEQ ID NO: 1080
  source 1..344: mol_type = other DNA

SEQ ID NO: 1297 - DNA, 344 bp, Homo sapiens; identical to SEQ ID NO: 1080
  source 1..344: mol_type = other DNA

SEQ ID NO: 1298 - DNA, 344 bp, Homo sapiens; identical to SEQ ID NO: 1080
  source 1..344: mol_type = other DNA

SEQ ID NO: 1299 - DNA, 344 bp, Homo sapiens; identical to SEQ ID NO: 1080
  source 1..344: mol_type = other DNA

SEQ ID NO: 1300 - DNA, 344 bp, Homo sapiens; identical to SEQ ID NO: 1080
  source 1..344: mol_type = other DNA

SEQ ID NO: 1301 - DNA, 344 bp, Homo sapiens; identical to SEQ ID NO: 1080
  source 1..344: mol_type = other DNA

SEQ ID NO: 1302 - DNA, 344 bp, Homo sapiens; identical to SEQ ID NO: 1080
  source 1..344: mol_type = other DNA

SEQ ID NO: 1303 - DNA, 344 bp, Homo sapiens; identical to SEQ ID NO: 1080
  source 1..344: mol_type = other DNA

SEQ ID NO: 1304 - DNA, 344 bp, Homo sapiens; identical to SEQ ID NO: 1080
  source 1..344: mol_type = other DNA

SEQ ID NO: 1305 - DNA, 344 bp, Homo sapiens; identical to SEQ ID NO: 1080
  source 1..344: mol_type = other DNA

SEQ ID NO: 1306 - DNA, 344 bp, Homo sapiens; identical to SEQ ID NO: 1080
  source 1..344: mol_type = other DNA

SEQ ID NO: 1307 - DNA, 344 bp, Homo sapiens; identical to SEQ ID NO: 1080
  source 1..344: mol_type = other DNA

SEQ ID NO: 1308 - DNA, 344 bp, Homo sapiens; identical to SEQ ID NO: 1080
  source 1..344: mol_type = other DNA

SEQ ID NO: 1309 - DNA, 344 bp, Homo sapiens; identical to SEQ ID NO: 1080
  source 1..344: mol_type = other DNA

SEQ ID NO: 1310 - DNA, 344 bp, Homo sapiens; identical to SEQ ID NO: 1080
  source 1..344: mol_type = other DNA

SEQ ID NO: 1311 - DNA, 344 bp, Homo sapiens; identical to SEQ ID NO: 1080
  source 1..344: mol_type = other DNA

SEQ ID NO: 1312 - DNA, 344 bp, Homo sapiens; identical to SEQ ID NO: 1080
  source 1..344: mol_type = other DNA

SEQ ID NO: 1313 - DNA, 344 bp, Homo sapiens; identical to SEQ ID NO: 1080
  source 1..344: mol_type = other DNA

SEQ ID NO: 1314 - DNA, 344 bp, Homo sapiens; identical to SEQ ID NO: 1080
  source 1..344: mol_type = other DNA

SEQ ID NO: 1315 - DNA, 344 bp, Homo sapiens; identical to SEQ ID NO: 1080
  source 1..344: mol_type = other DNA

SEQ ID NO: 1316 - DNA, 344 bp, Homo sapiens; identical to SEQ ID NO: 1080
  source 1..344: mol_type = other DNA

SEQ ID NO: 1317 - DNA, 344 bp, Homo sapiens; identical to SEQ ID NO: 1080
  source 1..344: mol_type = other DNA

SEQ ID NO: 1318 - DNA, 344 bp, Homo sapiens; identical to SEQ ID NO: 1080
  source 1..344: mol_type = other DNA

SEQ ID NO: 1319 - DNA, 344 bp, Homo sapiens; identical to SEQ ID NO: 1080
  source 1..344: mol_type = other DNA

SEQ ID NO: 1320 - DNA, 344 bp, Homo sapiens; identical to SEQ ID NO: 1080
  source 1..344: mol_type = other DNA

SEQ ID NO: 1321 - DNA, 344 bp, Homo sapiens; identical to SEQ ID NO: 1080
  source 1..344: mol_type = other DNA

SEQ ID NO: 1322 - DNA, 344 bp, Homo sapiens; identical to SEQ ID NO: 1080
  source 1..344: mol_type = other DNA

SEQ ID NO: 1323 - DNA, 344 bp, Homo sapiens; identical to SEQ ID NO: 1080
  source 1..344: mol_type = other DNA

SEQ ID NO: 1324 - DNA, 344 bp, Homo sapiens; identical to SEQ ID NO: 1080
  source 1..344: mol_type = other DNA

SEQ ID NO: 1325 - DNA, 344 bp, Homo sapiens; identical to SEQ ID NO: 1080
  source 1..344: mol_type = other DNA

SEQ ID NO: 1326 - DNA, 344 bp, Homo sapiens; identical to SEQ ID NO: 1080
  source 1..344: mol_type = other DNA

SEQ ID NO: 1327 - DNA, 344 bp, Homo sapiens; identical to SEQ ID NO: 1080
  source 1..344: mol_type = other DNA

SEQ ID NO: 1328 - DNA, 344 bp, Homo sapiens; identical to SEQ ID NO: 1080
  source 1..344: mol_type = other DNA

SEQ ID NO: 1329 - DNA, 344 bp, Homo sapiens; identical to SEQ ID NO: 1080
  source 1..344: mol_type = other DNA

SEQ ID NO: 1330 - DNA, 344 bp, Homo sapiens; identical to SEQ ID NO: 1080
  source 1..344: mol_type = other DNA

SEQ ID NO: 1331 - DNA, 344 bp, Homo sapiens; identical to SEQ ID NO: 1080
  source 1..344: mol_type = other DNA

SEQ ID NO: 1332 - DNA, 344 bp, Homo sapiens; identical to SEQ ID NO: 1080
  source 1..344: mol_type = other DNA

SEQ ID NO: 1333 - DNA, 344 bp, Homo sapiens; identical to SEQ ID NO: 1080
  source 1..344: mol_type = other DNA

SEQ ID NO: 1334 - DNA, 344 bp, Homo sapiens; identical to SEQ ID NO: 1080
  source 1..344: mol_type = other DNA

SEQ ID NO: 1335 - DNA, 344 bp, Homo sapiens; identical to SEQ ID NO: 1080
  source 1..344: mol_type = other DNA

SEQ ID NO: 1336 - DNA, 344 bp, Homo sapiens; identical to SEQ ID NO: 1080
  source 1..344: mol_type = other DNA

SEQ ID NO: 1337 - DNA, 344 bp, Homo sapiens; identical to SEQ ID NO: 1080
  source 1..344: mol_type = other DNA

SEQ ID NO: 1338 - DNA, 344 bp, Homo sapiens; identical to SEQ ID NO: 1080
  source 1..344: mol_type = other DNA

SEQ ID NO: 1339 - DNA, 344 bp, Homo sapiens; identical to SEQ ID NO: 1080
  source 1..344: mol_type = other DNA

SEQ ID NO: 1340 - DNA, 344 bp, Homo sapiens; identical to SEQ ID NO: 1080
  source 1..344: mol_type = other DNA

SEQ ID NO: 1341 - DNA, 344 bp, Homo sapiens; identical to SEQ ID NO: 1080
  source 1..344: mol_type = other DNA

SEQ ID NO: 1342 - DNA, 344 bp, Homo sapiens; identical to SEQ ID NO: 1080
  source 1..344: mol_type = other DNA

SEQ ID NO: 1343 - DNA, 344 bp, Homo sapiens; identical to SEQ ID NO: 1080
  source 1..344: mol_type = other DNA

SEQ ID NO: 1344 - DNA, 344 bp, Homo sapiens; identical to SEQ ID NO: 1080
  source 1..344: mol_type = other DNA

SEQ ID NO: 1345 - DNA, 344 bp, Homo sapiens; identical to SEQ ID NO: 1080
  source 1..344: mol_type = other DNA

SEQ ID NO: 1346 - DNA, 344 bp, Homo sapiens; identical to SEQ ID NO: 1080
  source 1..344: mol_type = other DNA

SEQ ID NO: 1347 - DNA, 344 bp, Homo sapiens; identical to SEQ ID NO: 1080
  source 1..344: mol_type = other DNA

SEQ ID NO: 1348 - DNA, 344 bp, Homo sapiens; identical to SEQ ID NO: 1080
  source 1..344: mol_type = other DNA

SEQ ID NO: 1349 - DNA, 344 bp, Homo sapiens; identical to SEQ ID NO: 1080
  source 1..344: mol_type = other DNA

SEQ ID NO: 1350 - DNA, 344 bp, Homo sapiens; identical to SEQ ID NO: 1080
  source 1..344: mol_type = other DNA

SEQ ID NO: 1351 - DNA, 344 bp, Homo sapiens; identical to SEQ ID NO: 1080
  source 1..344: mol_type = other DNA

SEQ ID NO: 1352 - DNA, 344 bp, Homo sapiens; identical to SEQ ID NO: 1080
  source 1..344: mol_type = other DNA

SEQ ID NO: 1353 - DNA, 344 bp, Homo sapiens; identical to SEQ ID NO: 1080
  source 1..344: mol_type = other DNA

SEQ ID NO: 1354 - DNA, 344 bp, Homo sapiens; identical to SEQ ID NO: 1080
  source 1..344: mol_type = other DNA

SEQ ID NO: 1355 - DNA, 344 bp, Homo sapiens; identical to SEQ ID NO: 1080
  source 1..344: mol_type = other DNA

SEQ ID NO: 1356 - DNA, 344 bp, Homo sapiens; identical to SEQ ID NO: 1080
  source 1..344: mol_type = other DNA

SEQ ID NO: 1357 - DNA, 344 bp, Homo sapiens; identical to SEQ ID NO: 1080
  source 1..344: mol_type = other DNA

SEQ ID NO: 1358 - DNA, 344 bp, Homo sapiens; identical to SEQ ID NO: 1080
  source 1..344: mol_type = other DNA

SEQ ID NO: 1359 - DNA, 344 bp, Homo sapiens; identical to SEQ ID NO: 1080
  source 1..344: mol_type = other DNA

SEQ ID NO: 1360 - DNA, 344 bp, Homo sapiens; identical to SEQ ID NO: 1080
  source 1..344: mol_type = other DNA

SEQ ID NO: 1361 - DNA, 344 bp, Homo sapiens; identical to SEQ ID NO: 1080
  source 1..344: mol_type = other DNA

SEQ ID NO: 1362 - DNA, 344 bp, Homo sapiens; identical to SEQ ID NO: 1080
  source 1..344: mol_type = other DNA

SEQ ID NO: 1363 - DNA, 344 bp, Homo sapiens; identical to SEQ ID NO: 1080
  source 1..344: mol_type = other DNA

SEQ ID NO: 1364 - DNA, 344 bp, Homo sapiens; identical to SEQ ID NO: 1080
  source 1..344: mol_type = other DNA

SEQ ID NO: 1365 - DNA, 344 bp, Homo sapiens; identical to SEQ ID NO: 1080
  source 1..344: mol_type = other DNA

SEQ ID NO: 1366 - DNA, 344 bp, Homo sapiens; identical to SEQ ID NO: 1080
  source 1..344: mol_type = other DNA

SEQ ID NO: 1367 - DNA, 344 bp, Homo sapiens; identical to SEQ ID NO: 1080
  source 1..344: mol_type = other DNA

SEQ ID NO: 1368 - DNA, 344 bp, Homo sapiens; identical to SEQ ID NO: 1080
  source 1..344: mol_type = other DNA

SEQ ID NO: 1369 - DNA, 344 bp, Homo sapiens; identical to SEQ ID NO: 1080
  source 1..344: mol_type = other DNA

SEQ ID NO: 1370 - DNA, 344 bp, Homo sapiens; identical to SEQ ID NO: 1080
  source 1..344: mol_type = other DNA

SEQ ID NO: 1371 - DNA, 344 bp, Homo sapiens; identical to SEQ ID NO: 1080
  source 1..344: mol_type = other DNA

SEQ ID NO: 1372 - DNA, 344 bp, Homo sapiens; identical to SEQ ID NO: 1080
  source 1..344: mol_type = other DNA

SEQ ID NO: 1373 - DNA, 344 bp, Homo sapiens; identical to SEQ ID NO: 1080
  source 1..344: mol_type = other DNA

SEQ ID NO: 1374 - DNA, 344 bp, Homo sapiens; identical to SEQ ID NO: 1080
  source 1..344: mol_type = other DNA

SEQ ID NO: 1375 - DNA, 344 bp, Homo sapiens; identical to SEQ ID NO: 1080
  source 1..344: mol_type = other DNA

SEQ ID NO: 1376 - DNA, 344 bp, Homo sapiens; identical to SEQ ID NO: 1080
  source 1..344: mol_type = other DNA

SEQ ID NO: 1377 - DNA, 344 bp, Homo sapiens; identical to SEQ ID NO: 1080
  source 1..344: mol_type = other DNA

SEQ ID NO: 1378 - DNA, 344 bp, Homo sapiens; identical to SEQ ID NO: 1080
  source 1..344: mol_type = other DNA

SEQ ID NO: 1379 - DNA, 344 bp, Homo sapiens; identical to SEQ ID NO: 1080
  source 1..344: mol_type = other DNA

SEQ ID NO: 1380 - DNA, 259 bp, Homo sapiens
  source 1..259: mol_type = other DNA
acagtgtaatacagtggacttaaaaggctggctttggtgccaaataacagttcaaacctgggctctactagttgtttgatgttacatgagtttttcttttttcttttccattctctttttcttttaacttccttgagcttcaacttcttcatgtacagaacgcagcaaggtgtaccagcataactatgtcacagggttaaatgagaggatgcatataaagctccaagcaccttactgggcacatggcaagtagtcaaca

SEQ ID NO: 1381 - DNA, 815 bp, Homo sapiens
  source 1..815: mol_type = other DNA
aaataataatttaagagtctcatatggctaagatggagaaacaggtactggacttttccctcctgcatgaaacaagcaaacaatggacaaaatatgtgaaacaacggtttgcaagccaccaaataccagggagtgaaggatagtgattcttgagagggcaaactcaggaggggagccctgtgattgtccagctcatgctccgaggagggtcccagctgcagtgtgcatgcggggggaacccaggtggagcctgccagcctccctgcagtaggaaaacaatgccagggatccagggagactaaggtggccggaactcgcggtcacagtactggagagagacacacagatctaagtcgggggccagagggagctccctcaactaggcagcacagccctactgatcagcgcatgtgtgtaaggaaccacctcaggccagagaaagagccatgtgagaagattagaaggaacagtggtgctgacacaggacctagggtagggcctgttcccaccaccctagctggaaaacctcatgatttatggggcactgggtagaaaacacaagtgagaaaccctagatgggcactgccacctgacacagctatacagcaggacctgaaaggatcacactgcatcctaggacaaagctcaaaagtacctctgggactacaaaaatattcagtgcccaagaaggtaaaatgtacaatgtctagcatccagtagagaggcatgaaaagcaggaaaatacattgcataatacagagaaaaattaatcacaactgacctggatctcagatgctagaaatagtagacaaaga

SEQ ID NO: 1382 - DNA, 174 bp, Homo sapiens
  source 1..174: mol_type = other DNA
agagaggaggaaatgggaatttggtgttcaacgggtttaaagtttcagttacaagaaatggacaagtccgagagctctgctgtgccacatcatgcctaaagtcaccgagactgtgttgtacacttttttgttaaaaggtaaatctcatgttaaatgttgttactacaattaaaa

SEQ ID NO: 1383 - DNA, 303 bp, Homo sapiens
  source 1..303: mol_type = other DNA
ggccgggcgtagtggctcacacctgtaatcctaccactttgggaggccaaggcgggtggatcggttgagatcaggagtttgagaccagcctggccaacatggtgcaaccctgtctctactaaaaataccaaaaattagctgggcgtggtggcacatgcctgtagtcccagctactcgggaggctgagggaggagaatcccttgaaccctggaggcggaggttgcagtaagccaaggtcatgccactgcactccagcctgggtgacagagtgagactctgtctcaaaaagaaaataagaagaaa

SEQ ID NO: 1384 - DNA, 290 bp, Homo sapiens
  source 1..290: mol_type = other DNA
ggcctggcacactggctcatgccttcagtctcagaatttcgggaggctgtggtggacagatcacttcagcccatgagttcgagaccactctgagcaaatggagaaaccctctacaaaaaatacataaattagctaagtgtgaggcgtacctgtagtcccagctacttgggaggctgaggtgggaagatcacttgagcccaggaggtcaaggatgcagtgagcgtgattgtgccaccacactccagcccagtaacacatctgaccctgtctgcaaaaaaaaaaaaaaaaaa

SEQ ID NO: 1385 - DNA, 198 bp, Homo sapiens
  source 1..198: mol_type = other DNA
aggagtggaggctttgacagagttatgggttcaaatcccagctctgctgttgattaaccctttttcagcaagtcacttactctctctcaattcaaattcctcctctacaaaaagtggaaagcagttacctcaaagaaactttctaaagattaaatgtgacactgcttagagcccagtggcacagggcctaacaaatgg

SEQ ID NO: 1386 - DNA, 294 bp, Homo sapiens
  source 1..294: mol_type = other DNA
ggccggtcatggtggctcatgcctgtaatcccaacactttgggaggctgaggtgggcagatcacctgaggttgggagttcgaggccagcctgaccaacgtggagaaatgccatctctactaaagatgcaaggattggccgggcgtggtggtgcgtgcctgtgatcccagctgctcaggaggctgaggcaggagaatcgcttggacctgggaggtggaggttgcggtgagctgagatcacgccattgcactccagcctgggcaacaagcgaaactctgtctcaaaaaaaaagaaa

SEQ ID NO: 1387 - DNA, 314 bp, Homo sapiens
  source 1..314: mol_type = other DNA
gtcaggtgcagtggctcacacctgtaatcccagcactttgggaggctgaggcaggtggatcagctgaggtcaggagtttgagaccagcctggctaacatggcaaaaccccatctttactaaaaatacaaaaatcagccaggcatggcggtgtgtgcctgtaatcccagctacttgggaggctgaagcgggagaatcacttgaacctgggagacagaggttgcagtgagctgatatcgcgcctttacactccagcctgggtgacaagagtcaaactgtcaaactgtctcaaaaaaaaaaaaaaaaaaaaaagaaa

SEQ ID NO: 1388 - DNA, 179 bp, Homo sapiens
  source 1..179: mol_type = other DNA
agtttgggttgatcctgtaacttactacctatcaccctggccgggttacttagtctttttatgcttgagtttctctgcatgtaaattggacatgacagtctaagaattgggaaagtttaaatgaagcatatgacgcattgtgcctaatacatgttttaagttttcaacacatgttcatt

SEQ ID NO: 1389 - DNA, 1170 bp, Homo sapiens
  source 1..1170: mol_type = other DNA
caaacattaacctgaaatggattacagacctaaatggtaaagctataagcttctaaaaatacatgggagaaatcctgaagatctggaataggcaaagatttctcagaaaggacacaaagcttaaatgaataaaattatgaattaaactccatcaaaatttaaagctttggcacttcaatggtaccattaagaaaactgataagccaacagaaagagagaaatatctttaatacttgtatccaacaaaaaattttggtccagaatatacaaagaactcttacaactgaataataaaaagacaaacaatccaattaaaaatggacaaattatttgaacagacagttcacaaaggaaaatatacaagtggccaatacatacaccaaaagatcttcaaacatcattagtcaccggtgaaatccaatcaaaaccaaaatgatactaccactcatctactagaatggttaaaattaaaaacatggacaattgtttgcaaggatgtggaacaaccagaactctcatacatggctggtggaaatgtaaaaatgtttgttacaagcagtttgcaattttgcagcttcttaccaagttaaacatatacttactatatgtacttagaagtacagttacctgtactataactgtactcttaagtattgactcaagaaaaatgtaagatatatatgcatataaattttatgtaaatgttcacagtagctttattcattagagcaaagaaccagaaacaacccaagttaatagttccactgcaggtgaatggcgacacaaattgtgtatttggtgatataacattcatacaatggaatactactcagcaatacaaaaggaatgagctactgatacttattaattttgataatatcctgtgcaaaagaaggtgcacagaaaggacatactgcatgattcggtttatatgaaactctagaaacattaaatctaacctctagtgaccaaaagcagatcattgctagggggcaataggtggggaagattggctgagattaagtacacaagaactctttaggatgatggaaataatgttctattacatcttgactgtggtagcagttacacatgtatgcaagtatgtcaaaactctatcaaaatgtacatgcatagtggtatatcttattgtatataaattatacctca

SEQ ID NO: 1390 - DNA, 1569 bp, Homo sapiens
  source 1..1569: mol_type = other DNA
tgggaggagggtaaaattattgattagctacgggtaggcttggtaagttttaacgcatgttaaaatttctaagataaggaataaaaatctagaaggtatgtgtaccttacaaactagtagagaagggaagtagaacaagaaacaatattcaatctgaaaaaaaggtaaagaagctgaagaaagaaaacatggaaaagagaagacaagtagcacaaaagtacatagcagcaataagtgcaaatatattagtaattacagtgcatatgagttgaaaaaatcctccacttaacagaaactggttattagatgggataaaataacaaaatatatttatatgctgtttacaagcaataccttaaaaagcatattctcgcttgaaagtaaaaaggatttaaaaagatattcctgacactactaaccaatagaaatgttgtatggctatatatatcatgtaaagttgactttgaggcagaaaacctgtccgagagagtgagggtcactcaatagttataaaaggaaggtataattttaaataagtgactacctgataatacactttcaaaatacattaagcagaaactaggactgcagaagaaataggtaaatttatcattattatagcttatttaaaataatctctgttaatgtgagaacaagcagaaaaaaattaagaaaaatatagatgattttaataacaggacttacaagcctgctgtaatggacacgtatggaacattgtattccacaactaaagtagaggaggaacacttagaaaaactgatcacattctggtcaaatacagccagctttaacaaatttcagtggattggcatcacattacactttctgtttacaattccattaacttaaatagaaattttgtgtgtgtgtgttttggaaattaacatgtttatttcaaaataacttgtggatcaaagaaaaacttgtaatgatagcagtaaattattgtacacgacaacttatgtatagctaaaatgggaatttatagattttaatgcttatattatgggactaaaggttgaggaataataaacatgcaattttaagaattagaaaaaaagcatactccccgattgaaataacaggggaataattaatgaactagagaaagtaaaagtaattcaaaaaggaaacaatgcaactaaaaatagattatttgagaagagtaacaaaattagcaaaccactggcaagattaataggtggggaaagaagtcataaagcagtatctggaatgaaaatgggaatgttactacaggtgtttcatgaatgatcaactttattttaatgcagttgaaagattaagtggaccaattcctaaaaaaaaatgtagctcatgctggcccaagaagtaatagaaaatggaatacccttaaaacaaaaaggaaaaatattcttacaaagaaaaaaataccaattctagacaggtttactggcaaattctacaaaacattcaaggaacaataattccagttgtacagagagtatttcatggtttggaaaaagaaatgactgtccccaacttttttttacgaagctctaagtataa

SEQ ID NO: 1391 - DNA, 297 bp, Homo sapiens
  source 1..297: mol_type = other DNA
ccaggggcagtggctcatgcctcatctcagcatgctgggaggcagaggccagaggattgcttgaggccagaagtttgagaccaacctggtcaacaaagtgagatcccacctctatataaaatttaaaaagtagtaggcacagtggtgcacgcctgtagtcccagctactgggaaggctgaggtgggagcatcacttgagcccagcagttcaaggtgcagtgaggcatgattgcaccactgtactcctgctgagcaagaccctgtctccaaaaaaaaaaaaaaaaaaaaaaaaaaaaa

SEQ ID NO: 1392 - DNA, 2215 bp, Homo sapiens
  source 1..2215: mol_type = other DNA
tttcagagaactgtagttgtgtgttttgatctgtctatgcgggctctctgaagaagtggctcacaggcttgtctttgttttgcctgccttggaactttctcagggctagtcttccaggaagtgctagttgaaagcatttaaaggcaattatctggcctcagcagccagatgagaaaagcagcagatggactgataaaactgggagtggaaaaactgggaaggaaatacatgggggccggggtggggataaggggtttgaaaagctcctgcataaaccagggaattgaggtcatgtgcaaggccagggcaatatgcacgctcacaaaaaacctgagaggaacctaagctttcagtctggttgaccttcaggctcagtgtaagcaggaagtaaagctttacacagagatgtaaatggcctggcaaaccattacaagagcgccctaaaacagggcaaatatgcaaagaccagaatagttttttgttttgttttggctttgggcatttaaagaaatctctgtcagatcacaaactgaccactaaactaagggaacagaggtttctgtgaccatgtacaacaaagaactttacaaaaatagttttgaaaagtcacaaaataaacaaacaatgcaaaataaacagcaacaacaaattctggggaaaagaatctgatttctagaattaacacattttaatattcaaaatgttcagttttcaataaaaaattatgaggaatgcaaagaagataatatgacccacagacacacagaaaaaagaaatgaataaaacctgtcctcaaagacacctttgttattggtcttactagataaagaatttaaatcaactgttctaaatgtgcacaaaaagctaaatgaaaccagacaactaacagaaagcaggtgagcgatgccctgccaaatataaaatattaatatacagaacaaaattacaaaaatgtaattaggaatgtctggagctgacaagtacaaaaactaaatttttttaaaatcagtcaaaggatttaataaaagattggagctcaaagagaacaaagaatcagcaaaattgaagacactgatggagattactcattctgtggagcagagaaaaagaatggtgaaaaatggacagtgcctaagagatctatgagacaacatcaagcataccaacaagttaataacaagagttgctaatgaagaggagaaaagggaaccaaaaatatctgaagaaataatgtctgaagaccttctaaactgatgaaagacatgaatctctatgcccaagactctcaagaaactataattaggataagctcaaagaacttcaaactgagagaaataataaattgtcacaagacaaagaatctcaaaagtagcaagagataagggactaaccatgtacaaaggatctgaaataagattaacagccagacttttattaggaaccatgaaggccagaggcagtaggataatggcacctttcaagtgccaaaagaaaaaaaatatatatcaaaaattctacatttggcaaaactgcctttcaaaaatgaaagagaaattaaaacattcctagatcaacagaatctgagagaatttattagtactagatctgtcctacaagaaatgcaaaaggaagtccttaaggttgaaacaaaaggacattagacagtaactccaatcgaaacacacaaaaaattcaaatggtaaaagtaactactgtaagtaaatgcaaaagccagtcttattgtattcttggcttttatgttctctcttttttctatatgatttaaaagacaaatacataaaacaataattataaatctatggtaatgtgcacgctatttatgaaggcataaaatgagacaataagaagacaaaggacagggacaaagccgtataggaggagagtttttatataatattaaggcttagttagtattaatgcaagctagattgttataaattcaagatgctaattgcaattccaagtattaacactaggtaaataatgactacaaacaaatacaaaaggaattaaaatggcacattagaaaaaaacaaacacaaaagaaggcatacacagaaaaactgaaaacaaaaaagatgtaatacgtatggaaaacaaatagcaaaatggtataagtcctttatcagtttataatttactctaaatgtaaataaactaaactcccaactaaaagacagaaattggcaaaata

SEQ ID NO: 1393 - DNA, 313 bp, Homo sapiens
  source 1..313: mol_type = other DNA
ggccaggtgcagtggctcacgcctgtaatcctaccactttgggaggctaaggcgggaggattgcctgagctcaggagttgagaccagcctgggcaacatggtgaaaccctatctctactaaaacacaaaaatgagccgggcgtggcagcctgcacctgtattcccagctactccggaggctgaggcagaagaattgcttcaacccaggaggtggaagttgcaatgagctgagatcatgccactgcactctacacttcagcctgggcgacagagcgagactccgtaccttaaaaaaaagaaaagataaaagaaa

SEQ ID NO: 1394 - DNA, 115 bp, Homo sapiens
  source 1..115: mol_type = other DNA
aatcccgttcgctctgacccttgctggctgatcaccttgagcaacttacttaacatctgtgttcctcagtttctcatgggtaatatagggataattactggcacctgcctcccag

SEQ ID NO: 1395 - DNA, 65 bp, Homo sapiens
  source 1..65: mol_type = other DNA
ctagattgtggatcttcagataaattctgccattttcatttcacttcctgaaagtcagggttggc

SEQ ID NO: 1396 - DNA, 634 bp, Homo sapiens
  source 1..634: mol_type = other DNA
aaaaaaaacctcagaagtaaaagtttttcctctcatcttctgaccttcagcctctcagtctcattttcccctgaggctagctataagaaactagaatccctgttccccaacgtgggttatagaaaccacaattccttttccccaaagccagccataaaatctgaaaatattactctaatttttcttctgcttttctgtgtaaaaactggccataaagaaattatcttacctaccttgtttaactgaaggtcataagatcctcattccagagagggccctgccacatagccaaaaggaagaagtgcatgctcagacaggtcaagaagaatctagacagacaggcctttctgggtttccctactcaatctattagtattaggtcatatcccttttgtccagtcatatttcttcatgactgttcataccttgttgaacctaaggattaaaatggtcaattttccctgtgtctttggtcttcattctgaaggcttatgttggaaatgtggtgttcaaatttcatgtaaagctatgatcaaataaatttgtatgccttttctcctcttcatctgcctcttgtcagtaattttcacctaaccttcagagggctaagcggaagtgttctcttggctccaac

SEQ ID NO: 1397 - DNA, 533 bp, Homo sapiens
  source 1..533: mol_type = other DNA
cttaatcaatccaaggcacctttctgctgaggatttggattcttgtataaaaaatacaaaagaaatatttactttttaactttcgatattaaatataggattttttaaatcgagtttttaggcttcaaatcgaggcattgtcaagacataaaatgtaaatttgtttatggttcaacatatcaaggctaggcctggtggaccaaatgatagggtttctcccatagtaaagacaaggtatcttagtccagtatgaaggatttagtcagagattgatataaggaaggtggtggctatgaagtaggtaaagtagaagaaaatcctattctctttggcttggagaattacgggaaaggggtagaagagctcaagaaagacaccagaaacatttttactgttcccaccctgaagatgtagggtgaggggttgtggctttagaaatatccagattggtgtgggaaaactcaaggacagagaaattactttcccaattctcagatatctgggaagatatcaggctgagcaggaaccacatt

SEQ ID NO: 1398 - DNA, 98 bp, Homo sapiens
  source 1..98: mol_type = other DNA
ccatgggagcaggtgctgtttatactcccttcattgacgcccagaacaatggcatagggtgagcattgaatacttatttgctacgcgcatgaatgaat

SEQ ID NO: 1399 - DNA, 303 bp, Homo sapiens
  source 1..303: mol_type = other DNA
gccgggcgcggtggctcacgcttgtaatcccagcactttgggaggccgaggcgggcggatcacgaggtcatgagatcgagaccatcctggctaacacggtgaaaccccgtctctactaaaaatacaaaaaaattagccgggcgtgatggcgggcgcctgtagtcccagctactcaggaggctgaggcaggagaatggcgtgaacccgggaggcggagcttgcagtgagccgagattgcgccactgcacttccacctgggccacagagcgagactccgtctcaaaaaaaaaaaaaaaaaaaaaa

SEQ ID NO: 1400 - DNA, 225 bp, Homo sapiens
  source 1..225: mol_type = other DNA
agcatttccaaagtgtgggtgggtccgttggttcccaagatacttttaggtggtatggggcctgcattaagtggcacaaaatcagagcaagaaagcgatgcccttcccaattctctcaatccttttatgccgagaagatctcagctggatgccaacatgttccgatgcctgtggaagacatgccgacgtctcctctgcctagggagcaggacttgggcttagggc

SEQ ID NO: 1401 - DNA, 108 bp, Homo sapiens
  source 1..108: mol_type = other DNA
gccaggtgcggtggctcatacctgtaatcccagcagttggggaggccaaggtgggaggattgcttgagcccaagagttggagaccagcctgggcaacatggtgagacc

SEQ ID NO: 1402 - DNA, 132 bp, Homo sapiens
  source 1..132: mol_type = other DNA
gctaggagtggtggctcacgccagtaatcctagcactttgggaggccgaggtgggcagatcacaaggtcagattgagaccatcctggccaacacggtgaaaccccatctctactaaaaatacaaaaatttgc

SEQ ID NO: 1403 - DNA, 305 bp, Homo sapiens
  source 1..305: mol_type = other DNA
cgggcggtggctcacgcctataatcccagcacttttgggaggccaaggcgggcggatcacgaggtcaggagatcaaaaccatcctggataacatggtgaaaccccatctctactaaaaatacaaaaaaattagctgggtgtggtggtgggcacctgtagtcccagctactcctgggactactcgggaggctgaagcaggagaatggcatgaacccaggagacagagcttgcagtgagccgagatcgcgccactgcactcaagcctgggcgacagagcgagactcctctcaaaaaaaaaaaaaaaa

SEQ ID NO: 1404 - DNA, 216 bp, Homo sapiens
  source 1..216: mol_type = other DNA
ctagtcacttacaatccttctcctagtctcggccctgacactacctcctctgtgaagtcttccttagcaagcactaggtttgccttctctgctcgctgtccttgcgctgagtactactgatcgcgctagtttctctgctgtcatctcacggtctccccagcggactgtgagctccacgaggaaagaacagcgccctttagtatttgcgttctcagc

SEQ ID NO: 1405 - DNA, 415 bp, Homo sapiens
  source 1..415: mol_type = other DNA
atgtcctttcaaggtcatctgtggagcaatgtttaacagcctgcccaagaaatatttaattacctagaggaaagtaagtacctttgttgacttgatatttgctaccaactaaatagccagattatgtgaagttacacattaatgtgtaggattttgcctagtagaaatacaaatgttttctgttcaggagaaaagataatctcaaagtttattaattgactcccgtgtaggacattaaccagttttgtttctaatttagcaatctcattccaacactcttcctccagtgcctatgtaaactcatgctgccatcttgttggtttcctcattaatgagctaaatgcatttttgacatgtccacattctagatttgtatgagtcacaattttaactttttgaaaattatactttgcca

SEQ ID NO: 1406 - DNA, 304 bp, Homo sapiens
  source 1..304: mol_type = other DNA
gctgggcgtggtggctcatgcctgtaatcccagcactttgggaggccgaggcaggcagatcacaaggtcaggagttcaagaccagcctggccaacatagtgaaaccctgtctctactaaaaatacaaaaaattagccgggcgtggtggcggccacctgtaattccagctactcaggaggctgaggcaggagaattacttgaaccctggaggtgcaggttgcagtgagcggagattgcaccactacactccagcctgggcgacagtgcaatactctgtctcaaaaaaaataaaaaaaaaataaaa

SEQ ID NO: 1407 - DNA, 297 bp, Homo sapiens
  source 1..297: mol_type = other DNA
gctgggtgcagtggctcacacctgtaatcccagcactttgggaggccaaggtgagcaagtcacttgaggtcgggagttcgagaccagcctgagcaacatggcgaaaccccgtctctactaaaaatacaaaaatcacccgggtgtggtggcaggcacctgtagtcccagctacccgggaggctgaggcaggagaatcacttgaacctgggaggtggaggttgcggtgagctgagatcacaccactgtattccagcctgggtgactgagactctaactaaaaaaaaaaaaaaaaaaaaa

SEQ ID NO: 1408 - DNA, 471 bp, Homo sapiens
  source 1..471: mol_type = other DNA
tgttatggactgaatttatctacaaaaatataaaatccctacatgaagtaaactccagttcctcagaatgtgatcatatttggagaaaggtcttcacagaagtaatgaagttaaaataaggtaatgaggatgtgatctaatctaatatggctgatgtccttagaggaaatttggaacacacacacctacagaggaaacatgatgagaagatacatctccttgaccatctataagtcaaggagggaggcctcaaaaggaatcaactctgaacacaaacacctacagaggaaacataataaggtacatctccttgaccatctataagtcaaggagggaggcctcaaaaggaatcaactctgctgacaccttgatcttggaattctgacctccgggactgtgagaaagtaaatttccatagtgaagccacccagtctgtagcactttgtaacagcagtcctagcaaattcatac

SEQ ID NO: 1409 - DNA, 3294 bp, Homo sapiens
  source 1..3294: mol_type = other DNA
gaaactcactcaaaaccacacaatttcatggaaattgaatatcctgctcctgaatgactcctgggtaaataatgaaattaaggcagaaatcaagaagttctttgaaaccaatgagaacaaagagacaacataccagaatctctgggacacagttaaagcagtgttaagagggaaatatatagcagtaaatgcccatattagaaagctaggaagatctcatatcgacaacttaacatcagaattcaaaaatctagagaggcaagagcaaactaatccaaaagccagcagaagacaaggaataactaagatcagagaagaactgaaggagataaagacacaaaaagccctccaaaaaatcaatgagtccaggagcaggttttctgaaaaaacttaacaaaatggatggactgccagctagactaataaagaagaagaagagagaagcatcagacagacacaataaaaaatgataaaggggataccaccactgaccccacagaaatacaggctaccatcagagaatgctgtaaacacctctatgcaaataaactagaaaatctagaagaaatggataaattcctggatgcatacaccctaccaagattaaaccaggaagaagtcaaattcctgaataaaccaataacaagctctgaaacagaggcagtaatgaatagcctaccaacgaaaaaaagcctaggaccagacagattcacaggtgaattctaccataaatacaaagaggagctggtaccattacttctgaaacttttaaaaacaattgaaaaggagagactcctccctaactcattttatgaagccagcatcatcctgataccaaaaccgggaagacacataacaaaaaaagaaaacttcaggccaatatccctgatgaacatcagtgcaaaaattctcaataaaatatgggaaacggaaaccagcagaacatcaaacaacttatccaccacgatcaagtcagcttcacctctgggacacaaagctggttcaacatacacaaatcaataaacacaatccatcacataaacagaaccaatgacaaaaaccatgattatttcaatagatgcagaaaaagcctctgataaaattcaacatccctgcatattaaaaactctcaataaaccaggtattgatggaacatatctcaaaataataaaagctatttatgacaagcccacagccaatatcatattgaatgagcaaaagctggaagtacccttcaaaaactggtgcaagacaaggatgcccagtctcaccactcctattcaacatagtattggaagttctggccagggaaatcaggcaagagaaagaaataaagagtattcgaataggaacagaggaagtcaagttgtccctgtttgcggacaacatgattttgtatttaggaaaccccatcatctcagctcaaaaacttcttgaactgataagcaacttcagcaaagtctcaggatacaaaatcaatgtgcaaaaatcacaagcattcctctaccccaacaataggcaagcagaaagccaaatcatgaatgaattcccattcacaatctctaaaaagagaataaaatatatagcaatacagctaacatgggatgtgaaggacctcctcaaggaggactacaaagcactgctcaaggaaatgagaggacacaaacaaatggaaaaaacattccatcctcatggataggaagaatcaataccgtgaaaatggccaaactccccaaagcaatttatagattcaatgttattcccatcaaactaccattgacattcttcacagaattagaaaaaactaggttaaatttcatatggaatcaaagaagaccctgtatagccaagacaatcctaagcaaaaagaacaaacctggaggcatcatgctatctgacttcaaactatactacaagactacagcaaccaaaacagcaaggtactggtaccaaaacagacatatagacctatgaagtagaacagagacctcagaaataacatcacacatctacaaccatctgatcttcaacaaatttgacaaaaaccagcaatggggaaaggatctcctattcagtaaatggtgctgggaaaacttgctagccatatgcagaaaactgaaactggacctcttcctcacaccttacacaaaaattaattgaagatggattaaatacttaaatgtaaaacctaaaaccttaaaaaccctagaagaaaacctggcaatgccattcaggacattgacatgacaaaaatgccaaaagcaattgcaacaagagccaaaattgacaaatgggatctaattaactaaaaagcttctgcacagcaaaagaaattatcatcagagtgaacaggcaatctacagaatgggagaacacttttgcaatctacccatctgagaaaggtctaatatccagaatttacaaggaacttaaacatatttacaagaaaaaaacaaacaaccccatcaaaacatggggaaaggatatgaacagacacttctcaaaagaagacatctacgtggccatcgaacatatgaaaaaaagctcaatatcactgatcatcagggaaatgcaaatcaaaaccacaatgagataccatctcacaccagtcaaaaatggcgattattaaaatgtcaggaaaccatagatgctggtaaggctgtgaggaaataggaacgcttttacactgtttgtggaaatgtaaattatttcaaccatcgtggaatacagtatggtgattcctcaacgatctagaaccagaaataccatttgacccagcaatcccattactgggtatatatccaaaggaatataaatcattctactatacagacacatgaagacatatgtttattgttgcactatttacaatagcaaagacatggaaccaaccaaaagcccatcaatgatagactggataaggaaatgttgtacatatacaccatgcaacactatactgccataaaaaggaatgagattatgtctttgcagggactcggatgacactagaagccatcatcatcctcagcaactaacacaggaacagaaaaccaaacacagcatattctcattcataagtgagagttgaaccttgagaacacatggacacagagaagggaacaacacacaacaaggcctattggagggtgtgggatgacaggagggaacttagaggacgggccagtaggtgcagcaaaccaccatggcacaggtatacctatgtaacaaacctgcacgatctgcacatgtatcctgtttttttttttttttttttagaagaaatacagaaaaaaa

SEQ ID NO: 1410 - DNA, 801 bp, Homo sapiens
  source 1..801: mol_type = other DNA
tccataaggactataactcattgaacgaaatggagtctatcactccatagtgatgacaactaaatagataaatcaaatacatacataagggagtaagaagggttcttacagaattcagaatgataaatgtagaactagtgatgaaagtggaaaaatcaccattctacaactataaatagtcaagaccaattaaatctgcaggggagcagtgaattttatgaggaataagaaatttgtgtggtcttgaagtttctccccacagactgcttactagttacaagagggaaaacagtaattatagagaagagaaactggaaaacaccttgaccaggtaatcaaaattaacatgaccaatgacaggtaggacagacatagtatgcttctgataccctagaaggacacgtcgtcatttatgtagacttctggccagagatgcatcacctgaatctaataatgagaaaatgccaagcccaaagtgaggaatattctagaaaataactggcctggtgttcttcaaaaatgttgatgtcatgaaacacaacaggtggctaaggaactgcttcagagagaaggagattaaagaggcaggacaaccaaatgcaatatgtgactccagattgaatcctccactggaagggaaaaatgctttaaaaaaaaaaaaaaaacacctcagttgggccaactgacaaaactggaatacagactgcagatcaaagtgccgcctcaatgttaaactccctgaatttgataactgaagaatgattacacagaatatccatgtccttagaaaatgaaagctga

SEQ ID NO: 1411 - DNA, 379 bp, Homo sapiens
  source 1..379: mol_type = other DNA
gtggcagtgacttcttagtgctcgtccacatctaggtcttctttagtcccaggctgatgggaacatttaattcctttgctccttgatgttagatgggatcaggtgactgatgctggccagtggactttgagggaggttgtgttacttctgagttggcatagtgaaaagcccatgaagatgctctgctctctttcttgcctaggatatccctggtcataggattcatttgatgcaggaacaaggtggtcagcctggctctttgaataactggaaatggcccctgcatacccgtgttggacatattacatgaggcagaaataaatttctgttgtgctaagccattgaaatgttggggttgttaccacagcatcacttagac

SEQ ID NO: 1412 - DNA, 461 bp, Homo sapiens
  source 1..461: mol_type = other DNA
acccctccctcattttgacaaaagctggtcagttgattgtcagagaaactgaatcagtgaaactccagatttgaagagagtacagaagaggagtacactacagatggggattaagcgaaagtcgacctactggatcaggagatacacttccttgtctttaatttctgtccatgtcctttttccacttgtttgcagagcactgacaattggagttatacacttcacctaggagactgaaggactcttttctaagaaatcgaatggcttcaggaaagagatcaacagagcccgatatttaaggctctccgtatctgcacaagcaggagttaccctgcagtaaagcctgctagttcacaagcctcacctacatgcagagagggtccagttggggttgacgaaccactctttatgggaacagcacccaagatacaccagacactggtggaaaattctaacaggaa

SEQ ID NO: 1413 - DNA, 98 bp, Homo sapiens
  source 1..98: mol_type = other DNA
ggcacaacacaatcttgaggtgccttctgaatcatcagattaaattatgcttcatatgtttttgcttttactgtatttctttaaaaactctaaatctt

SEQ ID NO: 1414 - DNA, 1589 bp, Homo sapiens
  source 1..1589: mol_type = other DNA
gaaaatcagtactggggactggggcattgctataaaaatacctgaaaatgtggaagtggctttggaaatgggaaatgggcagaggctggaagagttggagggctcagaaaaagacagaaagatgggggaaagtttgctacttcttagagagactggttaaatggtcatgaccaaaatactgatagaaatatgggcagcaaagtccaggctgatgaggtctcagatggaaatgaggaagttattggaactgcagtgaaggtcaccttgttataccttagcaaagaacttggctccattgtgtccaagtccttgggatctgtgaaagtttgaacttaagaatgatgacttggggtatttggcagaagaaattttttaagcagcaaagcattcaagaggtagcctgactgcttctaacagcctacaatcaagtgtgatcagtctaaggaatgacttaaagttcgaactcttatttaaaagggaaacagagtataaaagtttggaaaattcacagcctggccatgtggtagagaagaaaagcctgttttcagggtaacaattaaaaagggctgcagagcaaccacttgctaaagagattgacatgactaaaagagagccaagtactaatatcctagacaacaggaaaaaggccttgaaggcatttcagatcttccaagctgcccctcccattgcaggctcagaggctaaggaggaaagaatggtttcagaggccagaccctggacactcctgccatgtttagcctcaggacacggctgccccagttccagctgtggctcaaaagattccatgtacagctcaggctgcctcttctgagagtacaaactgccatatgccctggtggcttccatgcggtgttaagtgtgcaggtgcacaggatgcaagtgtgacacaggatggcagcttccccctagatttcagaggatgtatcagaaagcctgggtgcccaggcagaagcctgccatggagggagagcccccacataaagagactctactaggacagtgccaaaggaaaatgtggggtgggagcccccacagtgttttgtacctagtggagctacctagtggagccatggaaaggtggctgccaccctccagaccccagaatggtagagccaccagcaacttgcactcttcaagcctggaaaagatacagatagcagactccaacctgcgagagcagccatgggtactgcaccttgcaaagccataaagcaccagtgtgctctgaatgtgggacatggagtcaaggattatattggagctttaaggtttaatgcctgccctgttttgtttcagatttgcttcgggcttcttgcccctttctttgggccaatttctcccttttggaatgggaatgtttaccaaatgcctgtaccaccattgtgtcttggaagtaaataagttgttttgattttatagactcatgggtagagggaaatgagtcttagatgagacttaggaattggtacttgatggtggaatgagttaaaactttaaggactattgggaagggatgattgtattttgcaatataagaagaacatgagatttagggggccaagggcaga

SEQ ID NO: 1415 - DNA, 326 bp, Homo sapiens
  source 1..326: mol_type = other DNA
gttggcaaattaaggtccttgggccaaatctagcctgccacctgtttttgtatggcccctgaattaagaatagtttttaagtttttaaatggttgaaaaaaagtcaaaacaagagtatttgtgacatgtgaaaaatatatgaaattccaatttcagtgtccataaataaagttttattggaatacagccacgttcgttcatgtatgtgttgtctatggctgcttttgcactacaatggcagaattgggtggttgcaacatattttatggcccccagccctaaaatatttactgtttggccctttacagacaagcttgctgaccctt

SEQ ID NO: 1416 - DNA, 293 bp, Homo sapiens
  source 1..293: mol_type = other DNA
gtggtggctcatacatataataccaatgctttgggaagcaaacataggaggaccctctgagaacaggaattcaagacgagcctgggcaacatagcaagaccctgtctcaagaaattttttttttttttttaaattatctgggcatagtgtcacatgcctgtagccaagatattctgaaagctgagatgggaagatggcttgagcccagaaattcaagaatgtagtgagctatagttgcaccactgctctccaacctggacaacagcaagaccatgtctcattcaaacaaaaaa

SEQ ID NO: 1417 - DNA, 403 bp, Homo sapiens
  source 1..403: mol_type = other DNA
actcactgaaaagggtgaatcagtctggaataggggaatccacatatagacagggtagagtattttactgaaaactgaggaagtctacattttgaacagtaaaatctctaatacactgtccctcctcctcaccccaaaagaaaactggcaaagtacatatactcacacaggacaagtgattagagaatttctctcagatatatatgtacatattctctctcatatacatatactgacaattgggtgaccctcaaataaatggtctagtgaaatcacactggagtaaaatccacctgttgagaaccctcatgcatggagcttagagagatttcttctagctcttaaatttgaggaacagtaaatgatcccaaggcatttgaagaagcatcaaaataaaagacag

SEQ ID NO: 1418 - DNA, 315 bp, Homo sapiens
  source 1..315: mol_type = other DNA
gacccagcacggtggctcatgcctgtaatttcagcactttgggaggccgaggtgggcagatcacctgaggtcaagagttcgagaccagcctggccaacatagtgaaaccctgtctttactaaaaatacaaaaaaaaaattagccagtgggcgtgatggcaggcgcctgtaatcccagctacttgggaggctgaggcaagagaatcacttgaatctgggatgcagaggttgcagtgagccgagatcgcaccactgcactccaccatgggcaacagagtgagtctctgtctcaaaaaaaaaaaaaaaaaaaaaaaga

SEQ ID NO: 1419 - DNA, 347 bp, Homo sapiens
  source 1..347: mol_type = other DNA
ttttaaaaatctatgatcagaccaagaagaaaacaaagcgtatgataacagacctgcttgaagaagccctcgtcatattataagagaagccactcttcctcgtgttgtttccacctccaccaactatgagaatgatcttactggaaagggagactctggtaagaggtgactgaggcagaagacaggtgtggagctaggagagtcgcagcccctttaagtgagagctactcctttttgggttttcaggctcaggtgaaccacatccatagacagctaaaagaatctgaactgtcactgatgaatcactatcagtaatccttcagaaacctctgagaaaaggaaaggtg

SEQ ID NO: 1420 - DNA, 129 bp, Homo sapiens
  source 1..129: mol_type = other DNA
atggatgaaagttccagacacgaatgtcagatcagcgggaaagagctttccaatgagaagagctatccaacaatggaaagagtggctcctagagagtgagttcctcattgccagaggtacacaagtaga

SEQ ID NO: 1421 - DNA, 287 bp, Homo sapiens
  source 1..287: mol_type = other DNA
ccggacacaggggctcatgcctgtaatcccagcactctgggatgccaaggtgggcagatcatttgagctcaggagttcgagaccagcctggctaacatggggaaacctcgtccttactaaaaaaatacaaaaattagccaggcatggtggcaggtgcctgtaataccagctactcgggaggctgaggcaggagaatcacttgaacccaggaagcggaggttgcagtgagccgagatcacgccactgcaccccagcctgagcaacggggtgagactctgtctcaaaaa

SEQ ID NO: 1422 - DNA, 103 bp, Homo sapiens
  source 1..103: mol_type = other DNA
ttgactactggtcagcaagcctgccaatagcttcactacataagtttacaccaattgttgcacttctcagcctcaatttccctggacacaaaaggaagtggtt

SEQ ID NO: 1423 - DNA, 73 bp, Homo sapiens
  source 1..73: mol_type = other DNA
ctgtattctccaagggtcttgcatagtgttctgcccacagtgggtgcccagaaagtggctgttagaagaatgg

SEQ ID NO: 1424 - DNA, 311 bp, Homo sapiens
  source 1..311: mol_type = other DNA
gctgggcgcagtggctcacgcctctaatcccagcactttgggaggccgaggtgagtggatcacctgaggtcaggagttccagaccagcctggacaacatggtgaaaccccatttctactaaaaatacaaaaattagctgggcatggtggcacatgcctgtaatcccagctattcaggaggctgaggcaggagaatcgcttgaacccgggaggtggaggttgcagtgagccaagatcgcaccactgcactccagcctggacgacagagcaagactcagtctcaaaaaaaaaaaaaaaaaaaaaaaaaaaaaa

SEQ ID NO: 1425 - DNA, 1221 bp, Homo sapiens
  source 1..1221: mol_type = other DNA
tttttttctgcgagttggcaaattagaggctttgttaccatagctcacccactcagaaatagcaaaatagcatgtacagattcacatggtgaactttcatccaagaagaaacatgagagctaaatataaaagcaaaagaataattgaatactttgaaaaatacagtgggcattaggctacgctgtggatctgtggtggaaaactgtgagtgaatcaccagtgtatgacgggggagagagtatcttacaatacatatttctactaaggaacgaggcaatccaggccactggggagctccgtgaccctactgagagctagatcttaagttggagaacagggagactgtaagaaggaatggcagtagaaagtgctccatatgcactcccgtctccaactactgacagaaggccattcttgatccaactaagggggctgcacgaaaaccagccagccagcacaggtggcagacactggtttggagaatcttcagatcaggacttgcaatccagtctctagtgggacaggagcccctatggccagaactgagaggtgagaatatgtgggctccagctttgggtacaggagttgggcactacccgtttgcagcatgggaccaggaggggtgtggcctgggagccatgtttttgtctcagggagggagctttgagacctggggcgatgttacaatctgaagaaagactgcttataacttggctggctgtattagcataccactggcagcaggccatgggagggagccctgccaggctgaaagcatggacttcaggcaggtcccactactgcctgctaggctgtggaaccaaaactacccttctgtccctgtattggctctttgacacagcaccagttgctctgctcctccctcgagcattgccccaggggcctgagaactgctttctgatcctccttggggacagcacttgtgcttggtgttggggatgccggagcatgggactgtccagcctagccccatttggccttgcctccatcaacctgcatctgaggaagagcttgggaacagggcccctgggagttccacagcctagtccatcacctaagacatcagagtacctctggttaacaaaggtcaagcatattgccaccacctcagctggatctcgcatgctagcgccacctactggctgcaaggccaacctgcagagcttattacattatctgttgataaaattgcatggggtt

SEQ ID NO: 1426 - DNA, 1546 bp, Homo sapiens
  source 1..1546: mol_type = other DNA
tacattggtaccagtaaagtggggcgttgctgaaaaatacccaaaaatttggaagtgactttggaactgggtaacagaggttggaacagtttggaagactcagaagaagacaagaaaatgtgggaaagtttggaacttcctagagacttcttgaatggctttgacaaaaatgccgatagtgatgtgaacagtccaggctgaggtggtctcagatggaaatgaggaacttcttgggaactggaccagaggtgactcttgttacgttttagcaaagggactggtggcagtttgcccttgccctagagatttgtggaactttgaacttgaaagagatgatttaggtatctggccaaagaaatttctaagcagcaaagcattcaaaaggtgacttgggtgctgttaaaagcatttagttttataaaggaagcagagcataaaagttcagaaaatttgcagcctgacaatgcagtagaaaataaaaacccattttttgaggagaaattcaagccagttgcagaaatttgcataagtagcaaggagcctaatgttaatccccaagaccaaggggaagatgtctccaggccatgtcagagactttcacgtcagcccctcccatcacaggcctggaggcccaggaggatatggttttgtaggctgggcccagggtccctgtgctgtgtgcagtctagggacttggtgccctgtgtctcagccactccagctgtggctgaaaggggccaacgtatggctcaggctgtggcttcagaggttggaagccccaagccttggcagcttccacttggtgttgagagtgcagttgcacagaagtcaagaattcaggtttgggaacctctgcctagatttcagatgcatggaaatgcctggatgtgtgggcaaaagtttgctgcaggggcggggccctgatggagaacctctgctagggcagtgcagaagggaactgtggggttggagcccccacacagagtccccactggggcactgcctagtggagctgtgagaagagagccaccatcctccagaccccagaatggtagatccactgacaccttgcatcgtgctcctggaaaagctgcaggcactcagtgccagcctgtgagagcagccagaagggaggctgtaccctgtaaaaccacaggggcggagctgcccaagaccatgggaatccatctcttgtatcagtgagacctggagtcacaggagatcattttggagctttaaaatgtgactgtcccactggatttcggactcgcatgggccctgtaacccctttgttttggccaatttcttccattcagaatggctgtatttacccagtacctgtacccgcattgtatctaggaagtaactagcttgcttttagttttacaggcccataggtggaagggatttgccttgtctctgatgagactttggactgtggacttttgggttaatgctgaaatgagtaagactttgggggaactgttgggaaggcatgattggttttgaaatatgaggacatgagatttggaggggccaacggcag

SEQ ID NO: 1427 - DNA, 45 bp, Homo sapiens
  source 1..45: mol_type = other DNA
ttgggatagatgatccactgaaatcttttccagctctaagatttt

SEQ ID NO: 1428 - DNA, 49 bp, Homo sapiens
  source 1..49: mol_type = other DNA
cctggcaatgcacttggtggttgtgtgaccttgagaaagtctcttactc

SEQ ID NO: 1429 - DNA, 296 bp, Homo sapiens
  source 1..296: mol_type = other DNA
ggccagtgcagtggttcacacctgtaatcccagcactttgggaggccgaggtgggtggatcatttgaggttaggagtttgagaccagcctggccaacatggcgaaatcctctctctactaaaatacaaaaattagctgggcatggtggcaggtgcctgtaatctcagctactcgggaggctgaggcagaattgcttgaacccaggaggtggaggttgcagtgagccgagatcacaccactgcactccagcctgggagacagaacgagactcctaatcaaaaaaaaaacacaagaaa

SEQ ID NO: 1430 - DNA, 194 bp, Homo sapiens
  source 1..194: mol_type = other DNA
cagaagttctcatctggggtagattttggccttcagaagaccaatttggtgatgtctggagacatgttgggttgtcaaaactggggtggggaaaaggttgctactgtgcaatgcatacctcctcaacacccccccacactcagtaaagaattttccaacccaaaatatcattagtcctgaggttgagaaaccct

SEQ ID NO: 1431 - DNA, 111 bp, Homo sapiens
  source 1..111: mol_type = other DNA
gaaaagatactcaaggttttaagagtagttatctttgaaagatagcatttaaatgtttccttttgcttatgtgcattttctatttttttctacagttagcatgtatcactt

SEQ ID NO: 1432 - DNA, 93 bp, Homo sapiens
  source 1..93: mol_type = other DNA
acccctgaaccctgtgttatgtcaaacaatttcctaggttacttaggccaattatatttggacactgttacctctggccaaaagcatcctaac

SEQ ID NO: 1433 - DNA, 193 bp, Homo sapiens
  source 1..193: mol_type = other DNA
gtcaatggaaactgaggggaaatcttctggaggcttttgttaaaaatcttcctcatggataaaacaaatgagagacgaaatggccttttctgcctttgagatacaattttacaaagatgtaaaactggaagttatagcagcagctcttgtgatcgagaggtggaatagcctaaggcaaaacaaaccaactgag

SEQ ID NO: 1434 - DNA, 4319 bp, Homo sapiens
  source 1..4319: mol_type = other DNA
tcaaggtggctgactagaagtatcccgcagtcacctcctccacaaaaaaaaggaccaaaacagcaagaggataaccacacattgaatagagtatctaagagaacactgaaattcagcaaggaagtgacagggaccctctgaggcatagagtgagagggcagccaagcagctggcctggccaggatcggtttggaatgaggaaggtgtcttcattgtggggaaaaggtaggtgagagatccccagccatccactttcccaccacagatgctggtaatactagccacaagagagccactcagcactcacaggcccttagcctagtacagggagctgcctagggtctgtgcaagtgaattgttgcagagagggaactcacactggctcccactcactccccgagaccaaagcagctgcagcatggagccactttgagaacccaactcccaccagactacattattccctgaggcccaacgggccttgcattttcacatccccaaagtcccacttataacccctgtattcacctagaaagctgcaacaccacaatgacagctaaatctggcattgtggcttggtccccaggattctggcctatgcagtgcactacaccctggggaacaggtgatagagcacaccagggtggctgcccccagtactgatactccccagagccttagagctgcctgttctgggctgctgcaactcagaacaacctcccctccactccaacttcacaactgtgtgcaccttcatagggcctgaggacaggacttccataggcagactgtctccagtgcccacatacaccctccggatacctgcatattggcctgccccactcatagctgccaccactaccacatgctcatccatccggggccctgagggcaggcctgccctgatcgccactgttgatgcttgtgcatgccatccaggagcctgagggttcgtccgccttacgtggtactaccccgctttgcctgtatgcactattttgaagcctgaggatcagcccatccttctcaccaccacatgcccccttgtccactagccagaagactgaggacaggcctaccatgttcattgccactgacatatgcctacctgctgccatctgctgtcatggtcactaccactgcacatgtgcacttcccaggcccccagagacaggccactcaacctgctgctgtactcctcatctaggcattccatccaagatcctagggactggtctgcccagcctacaaacactacttctggtgtcttcactcccacgggcccaaggctgtcctgccactgctattgtcactgccagtgctatgcacactgtccaggggcccaaacacatgccaacctggccctcctcagctaccactaatgtccaagcatgctgcctggggcttgaggatcagcctacctgggtcaccccacagccattactggtgccagtgtatactacccaagggcccaaggactggcatgcctagtttaccagcaacatcactcatgcccaaggaccagcccacctggtgaccttgtccccagcaagtccttgtcacagctgccagcaacaactgcagccagtgtcactgaggaactcactgctcacatttattacagccaaagaaatcatacagagactacactactgcactttcccagaataaaagccaaaacaccctactgaacaaacaataaagatctacttacagggaaaaaaatctttcccgactaaagccagtccataaaattggaacaagtgactattaagacagatgcagaggtatcaacataaggacacaagaatgagaaagcaaggaaacatgacacttacaaaggaacatactttttcagtgacagatcctgcagaaagaaaagtctattaaatgtccgaaaaaattcaaaataatgatcttaaggaaacttagtgagatacaagacaacacagataagcaatataaagaaataagaaaaataatttatggcctgaatgagaaatttgacatagatgtaagaaagaaccaaacagaaattgtagaactgaagaattcaatgaatttttaaaaatacaattgatatcttcaacagtagactagatcaagcagaagaaataattaaacttgaagatagagcttccaaaataacccagccccaataaaaacaaaaaaccaaaaaaattttaaaaagccaaaagaaaataaaaggagtgaagaacatccatgtgacacatgggatgctataaagtaaacagatatatttggattttcagaaggagaagagatgggcaaagctatagaaaacctatttaatgaaataataactgaaaatttcccaagtcttttggaagatatagacatccagatacagaaaggtgaaagattcctaaacatatttcatctaaaaagatcttttctggtgcatgttttagtcaaacaggcaacagtaaaagagaattctacaaacagcaagagaaaagaattcagttacatgtaagggaagccatatcagactaacagcagattttccaacagaagtctgacagcccaagagaaaagagaatgatctattccaagtgctgaaaggaaaatactgccagccaaaactcctatatccagcaaagctatctttcaaacatgagggagaaataaatctgtcaaaacaactccagagaatcaaatagaaggaaattcttcctaactcattatatgagaccaacattacccttatgccaaaagcaggcaaggacacaagaaaaaagaaaagtacaggccaatattcctgatggacaaagatgcaaaactcctcaacaaaatctagcaaaccaaacccgatttcacatcaaaatgatcatttaccgtgatcaaataggaatcccagagattcagtgattgttcaacctacacaactcaataaatgtgatatgttacatcaatagaatgaaggacaaaagccaaatgttcattttactagatgcagaaaaagcatttgataaaattcagcatcccttcatgttaaagactcaacaaattaggcacagaaagagcatacatcaatataataagggtcatatatgacaaacccatggctaacatacatactgaatcgggaaaagctgaaagcctttcctctaagaactgagacaaggcaaagatgtctgctttcaccactcttattcaacatagtactggaagtcctagtcagaaatcaggaaagagaaagaaatataaggtatgaaaattggagaacaggaagtcaaattttccctctttgtaaacaacatgatcttgtatataagaaaacctaaagaccccataaaaaagaatctcttagaagtgatacacaagttcagtaaaattgcatttctacgcaccaataatgaactagctgaaaaagaaatcaagaaaactatgccatttacaatagctacaaaaaatacctaggaataaattaaacaaaaggggtgaaagattgctatgatgaagactataaaacactgattaaagaaattgaagaggactcaaacaaatggaatgacatcccttgctcatgattggaagaattaataatgttaaaatggccatactaccccccaaaattttcagattgaatgcaatctctatcaaaaatattaatgacattctttacagaatttgaaaaaatatcctaaaatttgtatgagatccacaaagaccctaattgcgaaagaaatactgagtaaaagatcaaagctgtaggcatcacaccacctggcgtggtgtgattcaaagtatactacaaagcaagagtaatcaaaatagtatgctattgatataaaaacagacacatagatcaatggaacagaatagagaagtaaatccacatatttacagccaactgactttcaataaagtatccaagaacatacattgggtaaagaatacactcttcaataaatagtgaagggaaaactggatatccatatgcaaaagaatgaaagtagactcctctctctcaccatagacagaaaccaactcaagatggagtaaatgcttaaatgtaaaatgaaaatgataaaaccagtagaagaaagcatagggaaacacttcaggacattagtgtttgcaaatattttatgggtaagactttaaaagcacaggtgacaaaaaagaaatataggtaaatgggattatattaaactaagaagcttctgcacagcaaaggaaagaatcaacagttatgagacaacctgtagaacgggagaaaatatttgcaaactatttatccaacaagggactaatacacagactatacaaggaactcagacaaatcaacagca

SEQ ID NO: 1435 - DNA, 134 bp, Homo sapiens
  source 1..134: mol_type = other DNA
gccaggcacagtggttcacatctgtaatcctagcactttcggaggccgaggtgggcagatcgctttagctcaggaatttgagattagcctgggcaacatggcgaaaccccatctctctacaaaaacaaacaaaa

SEQ ID NO: 1436 - DNA, 262 bp, Homo sapiens
  source 1..262: mol_type = other DNA
gcctggcacggtggctcaagcctgtaatcccagcactttgggaggtcggggcaggcagatcacttgaggtcgggaggtcaagaccagcctgggcaacatggtgaaaccccatgtctactaaaaatacaaaacttagctgggcgtggggccacatgcttttgtaatcccagctactaacacttgaatccaggaggcagaggttacagtaagctgagcttgcaccactgcactctagactctgcatctcaaacaaacaaaaaaa

SEQ ID NO: 1437 - DNA, 596 bp, Homo sapiens
  source 1..596: mol_type = other DNA
ttcccaaattatgttttatagaatattaatattctctaagttaataaatgttttgagaaaatgattgatgctaatattggtttttctttatggttgattttaatatgtttatttaaatatgagattaagactgctaaactcatttctatagcttttatttttatgtgataatctacctttaagaaaaggtgtaccatacctgagagcaccaggaagtcgcatgagagatcacctgatacatgaacgtatgatgttccatctgcgcattgatgaataggcagcatttacaaattaactgatgtgttgctgtatatcatctctttgatgattgctcctcttctttgtatcctgtcttataatttcaacacatttgcgatactcaatgtctattctaaattaaccatgttttgtaccacaaactcattgcccatggatctgttgctgaaacaaggaagtcttaaacaagaagtggaatctttctgttatcagattgtgtctgaatcaaatgatcagaaggttggaatattacaaagtgaagataagcagttgcaaccttcagtttctaaaaaatcagaaggtgagctttccagggtcaa

SEQ ID NO: 1438 - DNA, 623 bp, Homo sapiens
  source 1..623: mol_type = other DNA
gtgcgagtcatttacttattgcccctcacctctaaatctaccttctgtactcttcttccctgtaatgatggggctagttgtcctcaaactgtttctcagacttctttttaagcttgcttcctgttcagttctgccaataggggtcactagagagagactgggaggcagaaggagagaatatgcttcctgttttttctgttcttgttaatgttgcttacaggaccagcaatgcttcttcacctagagacacttctcccagcagtggcagtgccacttcagcttctttcagcactactggaatcagcctcagtgattccccctgtacccgctcagagattatccacagcagccagatggttctaccttccacaaagattgtggttgcaattctgggcttctaagttctggttacttcatatttttccttttgttcctccagccctagaggtggtagctgctttctgaagttattatttctagatgacttttggtttttcagcctttgtattttgcttttcagccctctaatgcctgtataaccaatttccctgtaataaataaatttcctccattgaaatacctagtatggctttttttttgtttgtttttctgactggactgac

SEQ ID NO: 1439 - DNA, 178 bp, Homo sapiens
  source 1..178: mol_type = other DNA
aagacacaggttctagcacagattttctaattagtggtatggccctaaacaagccaggttagatctctgccttcacccacatcaaacaggaataataatatatttccttaacctatcttctaggtaaacagatgagattatatgaaaacattttgctaaagtcgctaaacaaacataa

SEQ ID NO: 1440 - DNA, 834 bp, Homo sapiens
  source 1..834: mol_type = other DNA
aataagaatatatatttggtctttgtctccacttccaaacagagagcttctaaaacctatggtattcctaagtgacaggaatatcttttgttacttgtaacaagcccctttcaaccacactagagtttatgctaatgaggtgactagtggtgagtccccagacacttcaggatggacactggttgctagaggaaccaaccatgtgactagcgggttggtaccttcagttccacctctgggaatctagagaggggatgggggttggagattgagttaatcatcaaaggccaatgatgtactcaatcatgcctatgtaatgagacctccataaataccccacagacaggttttggagaggttccaagttgttgaacacactgaggtgctgggagggtggcatcccagaggcatggaagctctgccctccccctataccttgctctatgtatttcttccgtttggctgtttctgagttgtattctttataataaaccagtgcatgtaagtaaactgttttcctaggttctgtgagacgtgctagcaaattatagaacctgagtagagagtcatgggaattcccaactttgtagtcaagtgggacggaaggtgtgggtaacctggaaacctgctacttgcaactggcctctgatgtgagggcagtcttgtgggaatgagcccttaaacctatcacatctgaggctagctctgcgtagttagtatcagaattgaaatgaattctaggacactcagttggtactggaaaattggttggtgtggagggagcccctccaccctccgcatttggtgtcagaagtgctgggagtgaaaaaccgt

SEQ ID NO: 1441 - DNA, 206 bp, Homo sapiens
  source 1..206: mol_type = other DNA
cagtggttctgaatctgggccacattagaatcaccaggggaactttcaaaaaacctaatgctcgggcatactccagaccaattagcatatgtgctgccgaagcgagcactactccagaccaattaaatcagcatttttaagggtgggacccaggcatcagcaatttttaaggtaattctaatctacagtcaaggttgagaaccact

SEQ ID NO: 1442 - DNA, 304 bp, Homo sapiens
  source 1..304: mol_type = other DNA
gctgagtgtggtggctcatgcctgtaattccagcactttgggaggccgaggcaggaagactgcttgagcccaggagttcaagaccagcctgggcaacgtaggaagactccgtctctacatagaaattttattataaaagtagctggggatggtggcacacacctgtagtcccagctactcaggaggttgaggtgggaagattgcttgagcccaggagtttgaggttgcagtgagctgatcatgccactgcactctagcctaggctacagagcaggaccccatctccaaaaaaaaaaaaaaaaaa

SEQ ID NO: 1443 - DNA, 104 bp, Homo sapiens
  source 1..104: mol_type = other DNA
aaaactcagactttcggtcttggttctgccactcattggttatgaggaggcccagagcaggtaagttcaccttcctggccttactttcctgatgtgtaatacgg

SEQ ID NO: 1444 - DNA, 162 bp, Homo sapiens
  source 1..162: mol_type = other DNA
actgggctggcattcgaaagatctgggttctcatcctccctctgctccttgcaggccacgtgcccgtagaaaagatactcatccactgtgggttttggtgtcgccgtcaccccactgcctcactggattgtgaggatcatatgcgacaatgtatttgaaaac

SEQ ID NO: 1445 - DNA, 933 bp, Homo sapiens
  source 1..933: mol_type = other DNA
catttctactcacaggtctcagagcacttcaaactcagtgtgtccaaaacagagctaccatctgctccagatctgctttatttctggtattcttagctccttgaatggcaccatcatataataaattggacaagccagaacctggaagtcaatttgtcctttccctctctgtcatgttccatatctaacttaacatcaagctctgtccattttacttcctgacttcctctgtaacccatttcttcccgtgtttaccatcacctggtctcagctacccctgtctccctcctgactggcctcccacttccactcttgcccctccactcaattcttctctgttctgcagcccaagtgaccctctcaaaatgtaaatctgatcatgtcactctcctccttagtgctccctagtgactctccagagcttttggaatgaaaagcaaaattcctgtcatggtccacaaagccctgcctagtctggctctgccaacctatttccccacaatccagccacgttggctctctcctcctgtgtttcctgccaccacgtggcctttgcacttgcggtttcctcttactggaatttcctcccgccctccctgcttgcttcagtctggttaactcctacgtatttatcctctatatctctgcttgcccgactcctttttggaggagcttttcctgatcctctaggtcaaggggagctcccaacatctccccattagtgccatgctcctttccttccttgcatttgtcagttttaatttccactcctatgagtgatcactgggttaatgctttctcccgccacccacccgtctacaatctccatgaggttagaatctgtttctcatttgttcatccttgtgtccccagtgcccagcctatttcctgaacatagtagaggttcaaaacatatttggaaaatacatgaat

SEQ ID NO: 1446 - DNA, 3755 bp, Homo sapiens
  source 1..3755: mol_type = other DNA
tggtccagcatgtaagaagttcagaaatcaccactccatctgaacaagtaaaaaaactgaacaaactaaaaaatcaactcatcttagatccataagaaaagtgaggtcagagggcaaacttctccccaaaatcaaagggaaaaatgagcaaatacagagaatcataacttatggtgcagaaacccacaagcagaaatctcggcaggaaccagtgcttgagtgggaaaacctgaaccatagttgacaaattgctggaggctcagtacggacaactctgagagttaaatgctccaaggggacccaactatgggggcaggggactacaccttctgagttttacccccaggagctctacttgattcttgcattgaatattggataaaatcccctcatgttggaagggaaaacaatcattttgaaatatgccaaagcattttgttcttcttaacacagtctgtcttaaggagaaactaaccaaccagagcctaatctgctggggttttatcaaagcctaactgaccagggaaaagaaaatacccaactccaacccactctcaccacttcttccacttaaaggggcaggtgtgggagactgagaaacacttgtgatgtttgtagtccagaggtacaggttcactaaaagactgagacctaatcataacactatagaatgcttccgctccattcatacctcaccaacacattactaaaggcctatgtagagcagtttcttttacccagtatactatgtctggctatcaaggaaaaaattacaaggcatactaaaaggcagaaaagacacagtttgaagagacacagtgagcatcagaatcagactcagatatggcagggatcttggaattaatcagactggatgttaaaataagtatgattaagatgctaagggctgtaatagggctggatgaagcagacagaatgcaagaacagatggacaatgtaagcagcaagatggcaagtctaagaaagaaccaaaaggaaaggttagagataaaaaactctgtaacagaaatgaagaatgccttagatgagctcactaatagactggacatggttgaggaaagaatctctgaccttgaggatacttcagtagaaactgcaaaaactgaaaacaaagggaaaaaaagactgaaaaaaacccaaaacataatatccaggaactttgggacaactataaaaggtgtaatatacaggtcatagaaataccggaagaaatatttgaagcaataatgactgagaatttcccaaagtgaatgtcagataccaaaccacagatccagaaggcttagagaacatcaagcaggataaatgtcaaaaaactacacctagctgtatcatattcaaattatagaaaatcaaagataaagaaaatatcttgaaagcagtgaaagagaaaaaataccttgcctacaagggagcaaagataaaaattacacctgacttctcagaaaccatacaagcgagaagacaataaagtgaaatatttaaagcgttgagaggaaaaagacccaccagcctacaattctgtatacagcaaatttatctttcaaaagtgaaggagaaataaagacattctcagacaaacaaaaattgaaaaatttgttaccagtgacttgccttgcaagaaatgttgaaaaaaattatttagagagactaaaaattataggtcagaaattcagctctacatcaataaagaaaaatactgaagaagaaataaatgaaagtaaaatttaaaattatttttcatattcttaatttatgtaacaaataagagtttattcaaaataaaatagcaacaatgtattttattacacatgcttatgtataagtaaaatgaatgacagaatgatacaaggggggggaattaggatcattttgttataataagcactaaccaagaagcagtataatgtttggcgaaaatggacttggattaattgtaaatgtatattgcacactctagggcaaccactaaaaaaagtaaaaagtataactgatatgataagaaaggagagaaaattgaatcatataaagttgctaaattaaaataactaaaggcagaacaagagtgaaagacaaaaatagaaacgaagaacaagggtaacaaaaacagtaacaaatatgatagatattaacccaattatatcaataatcactttgaatatgagtggtcttaagcacaacaattaaaagacagagaatgttagaatggatcaagaaacaagactcagttacaggttgtctataagaaacctcctttaaatataaagactcatatcaattgaaagtaaatggatggagaaaggtatactatgctaaaactaatcaaaagaaagtggaagaaactagaacaatttcagacacagaacacttcacagcaagtaaagttattagggataaagaggagcattgccgaatgataaaggggtcagttctctaagaagacatagcaatccttaatgtgtgtgcacctaataacacagcatcaaaatacatgaagcaaaaactgatagaactgtgaggagaaatagatgagtccactagtatagtgggagagttcaacatccctctatcagaaatggacagattcagcaggcagaaaatcattaagaacataatcaaattcaaaaacatcatctataaactgtaaataatggacagctataaactagttcatccagcaatagcagaattcactgtacattcttctcaagctcacatggaatattcatcaagatagaccacattctagaccacttcatataccttaacaaatgtaaaaaaaaagtagaaatcgtagtgtctgctctcagaccacaatggaattaaactagaaatttataatagaaggatagctgaaaaatcccccaatacttggagatacaaatacaacatgtgtctaaataatacaagggtcaaagcagaaatctcaggagaaattaaaaagtactttgaactaaatgaaaataacacaagttatcaaaaactgtgcagtgcaataaaagtagtgctaagggggaaattgatagcatggagtgcatatattagaaaataggaaagatttaaaagaaatcacctaagctttcatcttcggaaactggaaaaacaagagcgaactaaatctatactgaacagaagaagagaaacaataaaaattagagcagaaatcaatgaaattgaaacagaaaattaacagagaaaaatcaataaaaccaaaagctggttctttgaaaagatcaataaaattaataagcccatagccaggctaacttagaaaaaagagagagaggaagaacataaattagtaatatcagagatgaaagaggggacatcattacaaaagtcatgtacattaaaaggataataaaggaatactgtgaacaactttatgcttacaaatttgataacctagctaaaatagaccaatttcttgaaagacgcaatctgccaaaactcacataagaagtaatacacactgaataagggtatatctattcaactgaaaatgaatcaataattaatagcctcctaaagcagaaagcatcaggtcaaaatgggttcgctggtgaattctaccaaacgtttaaggaaaaaagcacaccgattttctacaacctctttcaaagatagaagcacaaggaatacttcctaactcattctatgaagtcaacatcaccttcataccaaaaccaggcaaacacattggaagaaaataaatccgcagttcaatatatctt

SEQ ID NO: 1447 - DNA, 786 bp, Homo sapiens
  source 1..786: mol_type = other DNA
tatgtgcccctaatattaggattttcttcacagaacattatcattcaaaaaagaagtcattacatatattcaggttcttacaaaggctctcatgttactgactaatctttcaattacagtactttattttgaacatcaaaatggctttcatgaatgtttgcttatgatgcttgaagaagttactggtaaaatcagatttataaagaagaaagatttaacacaaatttagtaatttggtcatgacctcacaacgacaagtgttgggcattattgtaaacaaccctttttaagaacagataaagcaacaccacaagtgtcattgctatggagatcacaacccctgcaggatctatgacaaactgtcctgctatttagcaaattggtacttgtggtaaccgtgccacacctgaattttaaaaacggctatcccccaaacaatctggaagggaagaccatttcctccggaaagtaaaaaaaaaaaaaaaaaaaaaaaaaaaaagactctagtgataataaagacatttttgtgcctggggagtttttaatgaaatgtgagaggaaagaaaacaaggagcttttctaaattaaatatgttctataatatgccatgtgattttgaatgtgcctacaactaaatgaaggaaatactatacctagacatttaaccatttcaatctcagtcttaaaagttaatgtaaacaagttgttaaaaaaacttattttttgaggaaatcatctcatatggaaaatgagagatcatcttatattcaggattcacttaaattt

SEQ ID NO: 1448 - DNA, 192 bp, Homo sapiens
  source 1..192: mol_type = other DNA
agtactgtccaacagaagtttctgcagtgtcaggaatgtcctatatctatgctgtccaacatgatagccactagccacaaatagctattgagcacttgtaatgtgtcttgtactactaaggaactgaatttttaattaactttaaattgaaatagtcaaggtgactaatggctacccaatttagtagtgcag

SEQ ID NO: 1449 - DNA, 202 bp, Homo sapiens
  source 1..202: mol_type = other DNA
gatacaacagaaagaacttgggttttggagttgtattaggtttgaatttcactttttcattactgtgtgataactcagttggatatctttttcttcttctatttcctcatttactcaataggtgtaataataactacgtatcagattgttgggaagattaaatcagggaatatctatccttatcacagtgctccaatatata

SEQ ID NO: 1450 - DNA, 491 bp, Homo sapiens
  source 1..491: mol_type = other DNA
catgagcctggtcttgatttccttcctccaggctactttcatgatttatccctggccatgcctgatatggctcccagtcatgctgagctagtttcctcaacatattagaattgtttttcaggcctttatgcttttgctcatgttttttttttccttgacatgcttctttcttctatccatttgccagatttctttcacatcctaagattcaggtaacatcataacctcctatggaaagcaagccctctataggaattgttaagggcttccttgtctgtgttcccactgtgccatgtacctacttctttctgccacctcctacattggtgtacttttgttgttgttgttaagctgtccctattatactagattgtaacacatgctttctaccgcctagagcaggaactgtgtactcttaattgtttcctgagggcttgagattagcatctggcatgtagtaggtgtttaataaatatttcttgagtagatga

SEQ ID NO: 1451 - DNA, 302 bp, Homo sapiens
  source 1..302: mol_type = other DNA
ggccaggcacggtggctcatgcctgtaatcccagcactttgggaggccaaggcgggcagatcacctgaggtcaggagttcgagaccagcctggttaacatggcgaaatcccgtctctaataaaaatataaaaattagccgggcatggtggcatgcacctgtaatcccagctactcaggaagctgaggcaggagaatcatttgaactcgggaggtggaggctgcagtgagccaagatcacaccattgcaccccagcctgggcaacagtgaaactccatctcaaacaaaacaaaacaaaaaaca

SEQ ID NO: 1452 - DNA, 283 bp, Homo sapiens
  source 1..283: mol_type = other DNA
gctgggcatggtggctcatgcctgtaatcccaacactttgggaggctgaggtgggcggattgcctgagctcaggagttcgcgaccagcctgggcaacacggtgaaaccccgtctctactaaaatacaaaaaattagccaggcgtggtggcgtgcacctgtagtcccagctactcggaggctgaggcaggagacttgcttgaacccaggaggcggaggttgcagtgagctgagatcatgccattgcattccagcctgggttacaaagtgagactccatctcaaa

SEQ ID NO: 1453 - DNA, 224 bp, Homo sapiens
  source 1..224: mol_type = other DNA
aaggctggtgtggggtagtggagagagcactgagcttagagtcacaaccagatgaaactgctctggtcttcactagctgtgtgacttgggcaagcagcttgcagtctctgagcctctgagatccctgatggacgaggagaacaatgaccccctccccaggctgtgctgagagagggaattgatcttggatatgaaaatgctgccctggcacagaggtaggagct

SEQ ID NO: 1454 - DNA, 310 bp, Homo sapiens
  source 1..310: mol_type = other DNA
ggccgagtgggatggctcatgcctgtaatcccagcactttgggaggccaaggcaggcagattacttgaggtcaggagttcaagaccagcctggccaacatggtgaaaccccgtctctactaaacatataaaaattagccagttgtgcgggtgtgcgcctgtagtcccagctactcgggaggctgaggtgggagaattacttgaaccctggaggcagaggctacagtgagctgagatcatgccactgcactccagactgggggacagagtaagaccctgtcacagaaaaaaaaaaaaaaaaaaagaagaaa

SEQ ID NO: 1455 - DNA, 648 bp, Homo sapiens
  source 1..648: mol_type = other DNA
agttgattcttgttatttacagtacttttatgtgaagttgccatgaacagtgaattaatgaatatggaaattgttactcctaggggaaatataggattaggttcctgcgagcctctgatcataacatttttgtcaagtgataaatagataattttgttttatattagtttctgtttaaagacatttaatatgtatcattgattcgttaacattgaattaactgcaaacagccctaaattcatacctgaataaagtgatctaattgtgcattttctccataaggcatattgcagcttcctcgtgcttcatgctttagaaacactagatggcatttcaacactacccttggggaccacttaaatagtgaagtcaccaacaaaaagcacaaaaatatgaaaagcatggcactagatagatcatggaaaggacacttgtttatattttgagagctgaaacaagaaggcgtagtgccaccttgttctacctcagcagggaacatacccgttgaacaactcaaattttttgtcactttgtgcttatctgcaaatgaccacaaaaatgctgcaagtattgattttgttgtaacaagtaccttttggcaagtagggaaatttgtagatagggaatttgtgaagaatgagactcaac

SEQ ID NO: 1456 - DNA, 673 bp, Homo sapiens
  source 1..673: mol_type = other DNA
caagtcagaaaccaaggtctggtccttgtctcttccatctccgccagccatggtcaatcactcaggtaatcttttgattttttttctctttccattgttcaaatatgtctacttctctccatctatgctactgcattaaagaacaacactcatttctcacctggactacagcaccatgcctccagttttcctctccacactgccaaggggcagccggggaaatctctctaaaccacgaatatgattgtattattccatggcttcaaactcttcactggcttcccattgcccttgagatatcgtgacacctaaagcccttcatgccctgatcctggctccaacagtcctctctggactcatcaactcttcagcccctctgtgattctaggctcgtgccatccacctgccttttcttaatgttccctctatcttctgggctttctcacacacttcagcttctacctagtactttctccactacaccttccaaactccatccctcatccttcacatcccatcctagaagtcattttctctggaaagttttcaccccaacctctaccagcgctaagactagcttccccacctaggcgctttcatgtcattctgagcttacctcgtattagcatttatcttccagtgttgtgctcatatttgaatatgagattctaga

SEQ ID NO: 1457 - DNA, 170 bp, Homo sapiens
  source 1..170: mol_type = other DNA
aagggcagaccagtgcaaaagctactgatagtgaactggagggcccggtttccatcccttactctgccacactccaaagttcgatcttctgtaagtcactctaaatttatggcctttagatttattgcctctattaaaaagggcattgcaacaagtgacttaaacctccc

SEQ ID NO: 1458 - DNA, 147 bp, Homo sapiens
  source 1..147: mol_type = other DNA
atatggcacttcggcaagttacttaaacctcagttttcttgcctgtaaaatggggataataatacctattttgcaaggctgttgaaaggcttaagtgagttaatatgtaaaatgcttaacagaactcaataaataccaattattatt

SEQ ID NO: 1459 - DNA, 487 bp, Homo sapiens
  source 1..487: mol_type = other DNA
tgccttgccagatcttttctctaccgttttctatctagctctacgctctcagaggcgcaccttcatgcattgcctcaacagtctcttttgcccaccggcttctgagtgtgtttggcccaagtaagtcaacagggagagattagagagaaagtgaagagagaggttagggtactgaagacagaggttagggtactaaatgcccctgactcacttcctgtaggctacagagaggacctagctttattccttcctgagagaggccatctcttgcagtttcagctctctctctggcctctgataactactccctcttcttgctctttcaggcctttgggtgtaaggacttcctgctattgttagtcctgggacacttcaccatctcttcttggtccctcttaactctgtccaatctttacaaattatcctttcattaaactttcctcagtttccccatgtacatgtgtgattttcttgtctagactctgat

SEQ ID NO: 1460 - DNA, 709 bp, Homo sapiens
  source 1..709: mol_type = other DNA
ccataagacaccacgacacacacacaaaactaaaatttaaagacaaacaatatcatgttttggataggaaattaggcgattggaacactcctacaatttaatgaattaaattagtacaatcatttggaaaaatgtttggcattccctagaaactccacaattctgtctactcagagaaaaatctacgtatataaataggtatgtatgcatatacacgtgtgtgcaaaacaatacatgtacaagaatacaaaactgttcacagcagcatcatttttaacagccaaatcgaagtccaacagcattaaaatcaatatataaattatggcatagtcattttgtggaatactatacatcaatgaaaatgaactatggctatactcaaaatgtatatgaatctctcaacacactgctgaaaggaaagaaataatatacacagaaacaaaagcatactgtataacttatttattttcattcaaaaacaagcataaataacccatggtattgtaagtcaggaaagttttagtgtgtagtgacagggaataggacatgatggaaaagggtacagatggagaggcctacgaccattccagtttttacctatgtggcgatcacacagtgcattcactgtgataatgagtccagttgtatgcttataatttgtgtagttttcagcatgttttacttctctaaaaatgtttatagtaaaaaa

SEQ ID NO: 1461 - DNA, 159 bp, Homo sapiens
  source 1..159: mol_type = other DNA
actacttgttagccttgtgtccttggacaaattacgtaatttctctgtgtcctcatctgtaaatgagctagtaactgtcttgcagaataatgaatattaaatgagtaaagaaaagtgcttggtgcgtaaaagacataccaataaattttagtcatcgtt

SEQ ID NO: 1462 - DNA, 129 bp, Homo sapiens
  source 1..129: mol_type = other DNA
ggaatcaggtttatctaagttggagtcagggctctgacacagtacccttgggcaaatcatctctctgggcttcagtgttctcattttacaaataatgcctaattctcagggctgtatctcgagaatcaa

SEQ ID NO: 1463 - DNA, 41 bp, Homo sapiens
  source 1..41: mol_type = other DNA
ggcctatgtggcctttaaaatctcttccaatcctgagattc

SEQ ID NO: 1464 - DNA, 93 bp, Homo sapiens
  source 1..93: mol_type = other DNA
ttttgtgttgttttcatcttcatctttgtattactagcatccagcagagtgcctagcacatactggatgctcaataaacttttgatgaaatga

SEQ ID NO: 1465 - DNA, 292 bp, Homo sapiens
  source 1..292: mol_type = other DNA
agtagtccccccttatctgtggttttgctttcccagggctcggttatctgctgtacagtacaatgaaatattttgaaagagagagagaaagagagaccacattcacataatttttattacaatatattgttataattgctctattttgctgtgagctgttgttagtctcttactgtgcctaacttataaactgaactttatcatatgtacgtacatacaggaaaaaacattagggtttggtactagcagcggtttcaggcattaactgggggtcttaaaacatatcccccac

SEQ ID NO: 1466 - DNA, 309 bp, Homo sapiens
  source 1..309: mol_type = other DNA
gccaggtgtggtgactcacgcctgtaatcccagcactttgggaggccaaggcgggcaaatcaccaggtcaggagttcgagaccagcctggccaacatggtgaaactcccatctctactcaaaatacaaaaattagtcgggcatggtggcgcacacctgtagtcccagctactcaggaggctgaggcaggagaatagcttgaacctgggaggtggaggttgcagtgagccaaaattgtgccattgcactccagcctgggcgatagaatgaaacttcatctcaaaaaaaaacaaaacaaaacaaaacaaaa

SEQ ID NO: 1467 - DNA, 178 bp, Homo sapiens
  source 1..178: mol_type = other DNA
actaaaaggcaagaaacccaacttgttagctccccagttactcaaaattatttccgttgtttgacaacttgacattaaatttaaaactacacagggaaagacaagacaaatgaaacttgatcaaggaaatacagatattagatacatggatggaacaggcaactaaagaatacattgg

SEQ ID NO: 1468 - DNA, 72 bp, Homo sapiens
  source 1..72: mol_type = other DNA
tttgcattgcagcacctagtacaattccttggaaacagcgtggctcaataaatttttattgaatgaataaat

SEQ ID NO: 1469 - DNA, 122 bp, Homo sapiens
  source 1..122: mol_type = other DNA
aggactaccaaggttgtacaggttgttcactgcacaagggcacccgaccgaggacataagcggagactgacacccaggctactagcctctaaccaagtcagataccctaacatgaggctatg

SEQ ID NO: 1470 - DNA, 306 bp, Homo sapiens
  source 1..306: mol_type = other DNA
gccaggtgcagtggctcatgcctgtaatcccagcacttcgggaggctgaggtgggcggatcatgaagtcaggagatcaagaccatcatccaacatggtgaaactctgtctctactgaaatacaaaaatttagcagggcatggtggtgcgcacctgtagtcccagctacttaggaggctgaggcaggggaatcgcttgaacccaggaggtggagattgcaatgagccgagattgtgccactgcactccagcctggtgacacagcgagactccgtctcaaaaaaaaaaaaaaaaaaaaaaaaaaaaaa

SEQ ID NO: 1471 - DNA, 302 bp, Homo sapiens
  source 1..302: mol_type = other DNA
cgggcacggtggctcacgcctgtaatcccagcactttgggaggctgaggtgggcggatgacgaggtcaggagatcgagaccatcctggctaacacggtgaaaccctgtctctactaaaaatccaaaaaattagccgggcgcggtggcgggtgcctgtagtcccagctactcgggaggctgaggcaggagaatggggtgaacccgggaggcagagcttgcagtgagccgagatggcaccactgcactccagcctgggcgacagagcgagactctgtctcaaaaaaaaaaaaaaaaaaaaagaa

SEQ ID NO: 1472 - DNA, 129 bp, Homo sapiens
  source 1..129: mol_type = other DNA
tcagaatcacttgggaagcaattagaagtatacagagatgagtcctaacccagactcatgatcagaaattccagaagtggagctcaggaatctgcattttaaaatcactcaccaggtgattctcaggca

SEQ ID NO: 1473 - DNA, 2374 bp, Homo sapiens
  source 1..2374: mol_type = other DNA
atgcacaccttgttttattgtgctttgctttattgttcttcgcagacattgcattttttacagcttgaaggtttgtggcaaccctctgtccagcaaatctattggaaccatttttccaacagcatgtgctcactttgtgtctcacattatggttattatcccaatatttcaaatactttcattattattagggctattatggtgatctgtgatcagtgatctttgatgttaatattgtaattgttttggggtgccacaaacacaccatatgagatggtgagcttaatcaatgagtgtggtgtgtgttctgactgctccctcaaccagccatttctcatctttctccctttcctcaagcctccctattccatgagacacaactatattgaaattaggccaattagcaaccccacaaaggcttctaagtgttcaagtgaaagagtcgcatgtctgtccctttaaatcaaaagctagaaatgactgagcttagtgaggaaatcttgttaaaagctgagataggcctaaagctagacctcttgtgccgaatagtcagccaagttgtgaatgcaatggaaaagctcttgaagtaaattaaaagtgctactccagtgaatacataaatgacaagaaagcaaaacagccttattgctgctatagagaaacttctggtggtctgtatagaagatgaaatcaaccacaacattcttttaagccaacacctaatacagagcaaggccctaactgtcttaaattatatgaaggctgacagagatgaggaagttgcagaagaaatgttggaagctagcacaggttggctcatgaggtttaaggaaagaaaccatctccataacataaaagtttaaggtgaagcagtaagtgctgatgtagaagctgtagcaagatatgcagaagatctagctaagatgcttgataaatgtggctacactcaacaacagactttcactgtagatgaaacaactttttattggaagaaggcaccatctaggtctctcatagctagagaatagaagtcaaggcctggcttcaaagtttcaaaggacaggctgtccctctcattatggactaacataactggtgactttaagttaaagccaatgctcatttatcattttaaaaatcctattgcctgtgcagagtagattggaacaatgaaggctgaaggacagcacatctgcttacaggttagtttactgaatattttaagcccactgttgagaactactgctcagaaaagaagattcctttcaaaatattactgctcattgacacttaacctcgtcacccaagggctgtgatggagatatgcaagattaatgttgttttcttgcctgctaacacaacacccattctgatttctatttcaaatcaaaaagtaattttggctttcaagtctcattatttaaaaatacattttgttgaggctctagctgcctcagatggtgattcctctgatggatatgggcaaagtaaattgaaaacctattggaaaggattcatcattctagatgccattaagaacatgcatgattcatgggaggaggtcaagatagcaatattaataggagtttggaagaagttgattccaatcctcacggatgactttgaggggttcaagatttcagtggaggaagtaactgcagatgtggtggaagcagcaagagaagtagaatttgaagtgaagcctgaagatatgaccgaattgctgcaatcttgtaagattttagtggatgaggagttgcttctcatggatgagcgaagaaagtggtttcttgaggtgaaatgtactctcagtgcagatgctataaacaaagttgaaacgacaacaaaagatttagaatatccaataagcttaggtgataaagcagcagcaggatttgagaggatggacctaaattttaaaagaagttctattgtgggtaaaatgctgtcaaacagcatcacatgatatagagaaatctttcatgaaaggaacattcaaattgatatggccaacttcactgtggtcttattttaagaaattgccacagccactccaactttcagcaaccaccaccctgatcagtcagcagtcgtcaacactaaggcaagaccctccaccagcaaagagattataactcgttaaaggctcagatgattgttagcactttttagcaataaagattttgtaaattaaggtccataaattgctttttagacataatactattaaacacttaatagactatggtatagtgtaaacataacttttatacgcactgggaaacaaaaaaaattgtgcgatttcctttattgcaatgctcacttccttgcagtaatctggaaccaaccttgcaatatatctgaggtattcctg

SEQ ID NO: 1474 - DNA, 204 bp, Homo sapiens
  source 1..204: mol_type = other DNA
gattttgaaatgaaattggcttggattcaaatcctgccttcaccattttctgacaatgagaccttcaccttccaagcctcagtttccttatttatacaggggagtaataatgctcacctcatagagttgttctgataattaaataatacatttaaagtactcaccaggggcctggcatacagtaaagttgcagtaaatgatatc

SEQ ID NO: 1475 - DNA, 293 bp, Homo sapiens
  source 1..293: mol_type = other DNA
gccggtggcagtggctcactcctgtaatcccagcactttgggaggcccaggcaggtgtattacttgaggttaggagttcgagatcagcctggtgaaatcctgaccttcctaaaaatacaaaaattagcccagcatggtggctggtgcctgtaatcccagctacttgggagtaaggcaggaaaatcgcttgaacccaggaggcagaggctgcagtgagccaagattgcgccactgcactccagcctgggcgacagagtgagactgtctttaaaaaaaaaaaaaaaaaaaaaaaa

SEQ ID NO: 1476 - DNA, 315 bp, Homo sapiens
  source 1..315: mol_type = other DNA
tgttcagtaaggaagccactagccatatgtggttattgagcccttgggatgttgctattctgaattaaaatgtgtactgtaagtggaaaattcaagctgtgttcaaagacttagtatgaagaaagaatgtaaaatctcattaattttagaatattgattacacattgaactgataatgatttggatgtattgagttagacaaaatatattacaacaattaagtttaccttttaaaaaagttttattaaagtagctactaagaaatttaaaacaatatataccacttgcattatttctatagtatgacacagcact

SEQ ID NO: 1477 - DNA, 440 bp, Homo sapiens
  source 1..440: mol_type = other DNA
cagtgaaaacagtagagtgagtacctctgaaaattctctccttaactttttcaaaattctggaaattaactaaaagcttgcagcaatccatggaacattttttcaagaaaaacagctgaatctccgtaagaacagcaaatttaatggtatttcaacttaccctattccttccctctgatctgcagctccacagtcaccatgaaaaccagcaacacataataccactgaaagccaggagcctggcagccaccaacggattttaagtgccttcaaagcctcattcccagagaactgtcattatatcaacctatccggtgacatcctcaaacacgctacttggactgtctttatttgacctgactcacagcttggctagagcaaaaaaaaaaaaaaaaaaaaaaaatctcttccccacaagcatttgcctaaaatatttagag

SEQ ID NO: 1478 - DNA, 75 bp, Homo sapiens
  source 1..75: mol_type = other DNA
tgagatatacgtacatatcagcacctagcaaactgagtgacactaaacaagtgttcactaaatgtgttaactcta

SEQ ID NO: 1479 - DNA, 124 bp, Homo sapiens
  source 1..124: mol_type = other DNA
ggggagagaacagggagtgctcctccagcttcccaaagaaatatgtttttgtaagtggtaggaacatgtgcacacaatagaacatgaaataagttttttaacttgtaaaacatgtcaagatttt

SEQ ID NO: 1480 - DNA, 317 bp, Homo sapiens
  source 1..317: mol_type = other DNA
ggctgggtgcagtggctcatgtctataatcccagcactttaggaggccaaggtgggaggatcactggaggccaggagttcaagatcagcctgggcaacatggctagacgctgtctctacaaaaaattaaaaaaaaaaaaatcagacaggcaagtggcacatacctgtagttccagctacttgggaggctgaagcaggaagatcccttgaagcccaagatttcaaagttgcagtgagctaggatcatgccactgcactccagcctgggtgacagagcaagaccctctctcaaaaaaaaaaaaaaaaaaaaaaaaaaaa

SEQ ID NO: 1481 - DNA, 133 bp, Homo sapiens
  source 1..133: mol_type = other DNA
ctccagacatgcacccagtgtgtcacctcctaccagggctctagcctctgccctgtgctccttctgcctgggcccttcctacttctacagctgacagactccttcctactcatcttttaagacttgctcacaa

SEQ ID NO: 1482 - DNA, 348 bp, Homo sapiens
  source 1..348: mol_type = other DNA
acccatatattggcaagccccaaatctttgtaaccagcccagattgtcttcctgagcccccaactcccatacccactgcccattcagcagctagctgcatgttgaagtgtagtggtcttcccagacctaacataactaaacagaagtcttgatttgttccttcaaaaacaaacaaaaaactagccttgctcctcctcagtcttccccatgttatgaggtccccatcatttttacctggctacccaggcctaaaatgtgggcatcatctttgattctgcttcctcctgtgttcttcacatcatctgtttgcaattctttttttgtttgttttactggttttaaaaatta

SEQ ID NO: 1483 - DNA, 71 bp, Homo sapiens
  source 1..71: mol_type = other DNA
cttgtaacaattccagatcatccaatggcagaccagagaatggacatttcttcaaccatcagtgatttcat

SEQ ID NO: 1484 - DNA, 899 bp, Homo sapiens
  source 1..899: mol_type = other DNA
acttaactccagccgcctctagtcatctttccacccaaggggagtggggactgagacacagtggtgaaggtcacagcccaagggtatagtcttactgaaagactgagacctaatcataggtctatagaatccttcccccctacacacacaccttaccaccacaacactaaagccttgtttactacagtttattttcctgggtaatcatgtctggctttcagcaaaaagtacaaggcatactaaaaagcaaaaacagtttgaggaaatggagcaagcatcagaactctgatatggaagagatgttggaattatcagactgggcatttaaaacaactctgattaatatgctaagggttctaatgggaaaagtagataacataagtagataacatgcaagaacagatggacagtgcaagcagagagatggaaatttttagaaagaatcaaaacgaaacactagagataaaaaaaactagcagaaacgaaaaatgtttttgatggactcaacctctgagcttgaggatatgccaacagaaacatccaaaactgaaggcacagagagaaagatgacctaaaaaatggaacagaatatacaagaagtgggcaactacagaagattaacatacttgtaaatgataataccagaaacagaagatgagaacaaaaatatttgaagcaattatgactgagaatttccccaaattaatgccagacactaaaccacagatccatgaagctcagaaaacaccaaacaggataaatgccaaaaaaaaaaaaaaaaaaaaaaaacatctaggcatatcataatcacactgcagaaaatcaaagataaataaaacataagaagacagaggggaaaagtaccttagctataaaggaggaagaataagaattacatc

SEQ ID NO: 1485 - DNA, 66 bp, Homo sapiens
  source 1..66: mol_type = other DNA
ccctgacccagggtaagagtgggccctctcctttattgtccatataccagaatgacctcatgaatt

SEQ ID NO: 1486 - DNA, 309 bp, Homo sapiens
  source 1..309: mol_type = other DNA
ggctgagcgtagtggctcatgcctgtaagcccagcactttgggaggctgaggcgggtggatcacgcggtcaggagatcgagaccatcctgaccaacatggtgaaaccccgtctctactaaatatacaaaaattagccgggcatggtggcatgtacctgtagtctcagctactcaggaggctgaggcaggagaattgcttgaactggggaggtggaggctgcagtgaaccaagatcgtgccactgcactctagcctgggtgacagagcgagaatctgtctcaggaaaaaaaaaaaaagaaaaaaaaaaaa

SEQ ID NO: 1487 - DNA, 2059 bp, Homo sapiens
  source 1..2059: mol_type = other DNA
caggcatacctcgttttattgcactttgttttattgtgctttgcagatttttttttaagcaaattagaggtttatggcaaccctgcattgggcaagtctatcggcaccatttttccaacagcatgtgctcacttcatgtctctctgttacattttcataattctcacaatatttcaaactgtctcattattattatgtctgttatgacgatctataattagtgatcttgatgttactattgtaattattatggggccgcaccaaacaagcccaaataaggtggcaaacttgtgtgtattgtgtgtattctgattgttccaccaactggctgttcttccatccctctccctctccttgagccaccctgttctctgaggcacaacaatattgaaattgggccaattaataaccctacaatgacttctaagtgttcaaatgaaaggaagagcagcacataaaagtctcacattaaatcaacagctacgaatgacaactttgtgagaaaggcatgttgaaagctgagacaggtcaaaagctaggcctcttgtaccagttagccaagttgtgaatgcaaagggaaagttcttgagggaaatgcaaagtgctactccagttaattatgaatgataagaaagcaaaatagccttattgctgatatggagaaagtttgagcagtctggatagaagaccaaatgagccacaacattcccttaagccaaagcataatccggagcaaggccctaactctcttcaatttttgtgaaggctgagagaagggaggaagctgcagaagaaagtttgaagctagcagagattggttcacaaggtttaaggaaaatagcagtctccttaacataaaagtgaaggtgacacagccagtgctgatggagaagctgcagcaagttatccagaagatctaggtaagaccattgatgaaggtgactacatcaaaccacagactttcagtgtagatgaaacagccttatatgggaagaagatgctatctaggactttgatggccagagaggaaaagtcagcgcctggcttcaaaggacaagtggactcttttgttagaggctaatgctgctggtgaatttaagtcgaagccaatgcttatttactattctgaaaatcttagggcctttaggaattaactctgcctgtgctctacaaatggaataaggaagcctgagtgacagcacacttgtttatagcatggtttactgagtattttaagcccactgttgagacatactactcagaaaaaaagattcccttagagatgttatttctcattgataatgcacctagccatcaagagctcagatggagatgtacatggagattattgttgtcttcatgcttgctaacagagcatccattctgtaggccatggatcaaggagtaatttcaactttcaagtcttattatttcagaagtacattttgtaaggctgtagttgccatacatagtaattctgctaattgatctgggcaacgtaaattgaaaactttctaggaaggagtcaccattctagataccattaagaatgtttgtgattcatgggggtaagtaaaaatagcaatattaagaggaatttgaaagaaatttatttcaaccctcatggatgactttgaagggatcaagacttcattggaggaggtaactgcagatgtagtagaaatagcaagagaagtggaattagaagtagaagtggagcctaaagatgtgactgaattgctgcagtctcatgatacaacttgagaagatgaggaattgcttcttcaaaatgaacaaagaaagtactttcttgagttggaaactaccctggtgaaagatgctgtaaacattgtttaaatgacaacaaaggatttagaatattacataaatgtagttgataaagcagcagcagagtttgagaggattgacccaactttgaatgatgttctgctgtgggtaaaatgctatcaaacagcattgtatgtaacagaaaaatattttgtaaagaaagagtcaatgaggcaaacttcattgtcttattttaagaaattgccacagt

SEQ ID NO: 1488 - DNA, 292 bp, Homo sapiens
  source 1..292: mol_type = other DNA
ggccgggcacggtggctcctgcctgtaatcccaacactttgggaggccaaggtgggcggatcacctgaggtcaggagtttgagaccagcctggccaacatggtgaaaccccgtctctacacaaaaattagccaggcgtggtagcgggcatctgtaatcccagctacttggggggctgaggcaggagaatcgcttgaacccaggaggcggaggttgcagtgagccgagatcacgccactgcactcccgcctgggtgacaagagcaaaactccatcttaaaaaaaaagaaaaaa

SEQ ID NO: 1489 - DNA, 150 bp, Homo sapiens
  source 1..150: mol_type = other DNA
ggccaagtcggttaacccccttggatgttagtttccttctcggtaaaatggagcaagttcccaccttgtagaactagtgccaggataagaaatcatatttgtggattgcctggcatataaaaaggattcagtaagaaataggtatgatta

SEQ ID NO: 1490 - DNA, 569 bp, Homo sapiens
  source 1..569: mol_type = other DNA
tgttgtgaactgtattcgccacagatgaccacagcaacatctctggatcccacatgcaaggtgaccttgccatcctcccactgagaggtgggatctatgcaccttcctctcgaatctggagggctcgtgactgctttgaccaatacagtatggcagaagggacagtctctgccttccaaggctagatgataaaaggtgaggcagcttctgcattgttcactgtaccctttgcccttgagccctgagctccatgtaagaagtttgccaatccccaggaagccacgccatgtggagaggctgcagccatcttaaccttcaagtcatcccagcccaggagtgagacgtgggagtgaacaaactctggaataactctagccttcagctatcaagtcaatgccagccctgctgttttccaagcagaggctccacacatggcagaccagacatatgccatctctgctatatcttgtcccaattcctggtgcagagaccccatgaacataatgaaatggtagtttcaagaagctacattatggagtaatttgttgtacagaaacagtaactaaaac

SEQ ID NO: 1491 - DNA, 287 bp, Homo sapiens
  source 1..287: mol_type = other DNA
gttccaggggaccaaacttgaaccataggtggaagttagacaggttttttattgcctagacaccaaggtgaccattaatcagcataaggaaaaatgtgcccaaaagtagacctgttaaaactagaggcagttttgcaaggacatgagccctgtcactccctgttcctgggaatattcactcagaatctggaaaactctgtatcccagatattacagaaggggttcctgcatgaggtgaaaaggagacaaagaggtgatctttcaaaggtctttcagttttatgattc

SEQ ID NO: 1492 - DNA, 308 bp, Homo sapiens
  source 1..308: mol_type = other DNA
gccaggtgcggtggctcatgcctgtaatcctagcactttgggaggctgaggtaggtggatcacttgagggcgggagttcaagaccagcctggccaacatggtaaaaccctgtctctactaaaaatacaaaaaattagctgggcatggtggcacatgcctatagtcccagctactcgggaggctgaggtgggagaatcacttgaacccaagagacagtggttgcagtgagccgagatcatgccacctttctccggcctgggcagtagagcaagactacgtctcgaaaaaaaaaaaaaaaaaaaaaaaaa

SEQ ID NO: 1493 - DNA, 330 bp, Homo sapiens
  source 1..330: mol_type = other DNA
ggccaggcgtggtagctcatgcctgtaatcccagcactttgggaggctaaggcgggcggaccctgaggtcaggagatcgagactatcctggctaacacggtgaaaccccgtctctactaaaaatacaaaaacaaacaaacaaacaaaaaactagctgggcatggtggtgggcacctgtagtcccagctactcgggaggctgaggcaggagaatggcgtgaacccgggaggcggagcttgcagtgagccaagattgtgccactgcactccagcctgggcaacagagcgggatgagactctgtctcaaaaaaaaaaaaaacaaaacaaaaaa

SEQ ID NO: 1494 - DNA, 1717 bp, Homo sapiens
  source 1..1717: mol_type = other DNA
aagatcaccaaataggaacagctccagtctatagctccaagcaagattaacacaggaggtgggtgatttctccatttccaactgaggtacccagctcatctcactgggactggttagacagtgggtgtggctcacggagggcaagccaaagcagggtggagcatcacctcacctgggaagtgaaaggggtcgagaaattcccacccctagccaagggaagctgtgagggattgtgccatgaggaacagtgcattccagcccagatattatgtttttcccatgggctttgcaacctgcagacccggagattccctcaggtgcctacaccaccagggcactgggtttcaagcacaaaatggggcagttgtttgggcagatgccaagctagctgcaggagtttttttttttttttttttcatatcccagtgatgcctggaatgccagtgagacagaatcgttcactgccctggaaagggtgctgaagccagagagccaagtggcctagctcagcggatcccacccccatggagcccagcaagctaagatccactggcttgaaattctcactgccagcacaacagtctgaagacaacctggtatgctcaagcttgatggaaggggcatccaccattactgaagcttgagtaggtggttttccactcatagtgtaaacaaagctgctgggaagtttgaactgggtggagcccaccatagctcagcaaagctgctgtagccagactgcctctctacattccttctctctgggccagggcatcactgaaagaaaggcagcagcctcagtcaggtacttatagataaagcttccatctccctgggacagagcacctgggtgaagggacagctgtgggcgcagcttcaacagacttaaatattcctgcctgttggctctgaagagagcagcagatctcccagcacagtgctctagctctgctaagggacagactgcctcctcaaatgggtccctgacacccatgactcctgagtgggagacatctcccagcaggggtcaacagacacctcatacaggagagctctggctggcatctggcaggtagtcctctgagacaaagcctccagagggaggaacaggcggcaatctttgctgttctacagcctccactggtgatatccaggcaaaaaggctctggagcgtgcctccagcaaactccaacagacctgtagctgaggggcctgttagaaggaaaactaacaaacagaaaggaatagcatcaactcaacaaaaaggatgtccacaccaaaaccccatccgtaggtcaccaacatcaaagaccaaaggtagatatatccatgaggatgaggaaaaaacagagcaaaacatctgaaaattccaaaagccagaaagcctcttctcctccaaaggatcacaactccttgccagcatgggaacaaaactggatgcagaatgagtttgacaaattgaaagaagtaggcttcagaaggtgggtaataacaaactcctccaagctaaaggagcatgttctaacccaatgcaaggaagctaagcaccttaaaaaaagtttagaagaattgctaactagagtaacccatttatagaagaacataaataacctgatggagctgaaaaacacagcacaagaacttcatgaagcatacagaagtatcaatagctgaatcgatcaagcagaagaaaagatatcagagattgaagatcaac

SEQ ID NO: 1495 - DNA, 2382 bp, Homo sapiens
  source 1..2382: mol_type = other DNA
gccttcacagacatcctaagcaccaagcagcctaagccactgatgaacttgcagataccactgatgtggattatagtctaattaattgtagagacaccacacttctgcactgaaccagaaccaaagccaaagcaccctacccaaatgatactacagacgcgtgtacaggaaaagtccttactaaggctactccataaaattggaagtctctgttattccagatatgcagatatcaacttggggacacaaaaaacttggggggaaaaaaacaagaaaacatgacttgccaaaagaacacaataattctccaataatagactccaaagtaaaggaaatcttaaggaaacccaatgagatacaagagaacacaaatagacaatacaaacatatcaggaaaacaattcattatctaaatgggaaatccagcagagttagatatgaaaaagaaccaaacaaaaatcctggaggtgataaattaaatgaatgaaataaaaaatacaattgaaagcttcaaaagccggctaagtcaagcagaagaaataatttctaaatttgaagacaggtgttttgcaataaaccagacagatttaaaaaataacaataaaaaagaatgaagaatgcctgcgtgacatatgagacactattaagctaacaatatttcacattttgggagttccagaagaagtgttgggataaggaccagaaaatctatttaagaagataatacctgaaaactgccaaagtttgggagagaaagagactaacagataaaggaagctcacaaatccctaaatagattcaaccctaaaagggcctctctgaggcacattttcatcaaactgtcaaaaatcaaagagagaatttaaaaaacaagagagaagcatgaagtcacatataagggaatcaacagcagattaacagatttttcagcagaaaccttctaggccaggaaagaattgaatgccatattaaaagtgctgcaaggtggggaaaagctcacaaaattgctagccacaaatactatacccagcaaagctatccttcagaaatgaagcagaatgagggaagaaattttgcctccctcagacaagcaaaaactgagggaattcattactactaaatcagccccacaagaaatgcttaagggagtactacatctggaagtaggaggatgatatctaccatcatgaaactacaaaagcataaaacactagtagagcagatacacaaatgagaaaggaaaaggaataaaagattatcactacagaaaaccaaaaaattgcaaagaaaaacaatgagaggaaacaaaagtatacaaatcagtcagaaaacaataaaatgacaggagtaagtcctcacctattgataacaatcttgaatgtaggtaatttaaatttcccaaatgaaagatagatactggctaaatgaattaaaaaaataaaacccaattacatgctgcctataagaaactgacttcacctgtaaagacacccatagactgtaagggaatggatagaaaaagatattccacacaaacagacaccaaaagcatgcaggagtagacagacaaaaaatactgagtcaaaaaaaaaaaaaaaaaaaaaaagaaaaagaaaaaagagacaaaggaggtcattatataattataaatggatcaattcagcaagaagatataacaattatatatgcaaccaacaacactggagtacccaggtatattaaacaaatattattagtgctaaagagatagaccccaatacaataatagttagggatggcaacatttcatactcagcattggacaattcatttggatggaaaaatatcaacaaggaaatattagatttgaactgctgcttcgttagcacacagcacattctccaggatataccatatgttaggacacaaaacgggtctcaataaatttttaaaagtcaaaatcttatcaagtatcttctcagaccacaatggaataaaactggaaatcaataacaagaggaacttctgaaattgaacagatacacggaaatcaaactacatgttcctgaatgaccactgtgtctatgaagaaattgattttaaaaatttaaaaattctttgaaacaaatgaaaatagaaacacagcatacaaaaatgtatagggtacaacaaaagaagtgctatgagggacatttatttcaataaacacccacatcaataaggtagaaagtttttaaacaaataacctaataaacgcatctcaaggaactagaaaagcaagaacaaatcaaacctaaaattagaaggaaataaatagtaaagatcagagcagatctaaatgaaatagagataaaaggtaaaaaagacaaaagatcaatgaaatgaggcctcccccccaccccc

SEQ ID NO: 1496 - DNA, 106 bp, Homo sapiens
  source 1..106: mol_type = other DNA
acaggttagatgataaaggccaagtggttcgcatcaacttcaataacgcaactagggacacaatatttgatgtgcctgttgaaagagttcagcctttttatgctgc

SEQ ID NO: 1497 - DNA, 157 bp, Homo sapiens
  source 1..157: mol_type = other DNA
ccaggtgcagtggctcacgcctataatcctaatgctttgggaggctgaggtggaagccaaggagtttcaggctgcagtgagctatgatcacaccactgtgttccagcctgggagacaaagcaagatcctgtctcttttaaaacaaaaaacaaacaaa

SEQ ID NO: 1498 - DNA, 300 bp, Homo sapiens
  source 1..300: mol_type = other DNA
agtcatgcgccgcattacaacttttcaaagacagaccgcgtatttgacagtggtcccgtaagattataataccatattcttactgtatgttttctatgtctagatacacaaataccattgtgttacaactgcctacagtattcagtacagtaacatgctgtacaggtttaccatatagcctgggtacgttgtgggctatgccacctaggtttgtgtaagtacactaggatgttcgcacaacggaattgcctaacaatgcatttctcagaatgtatccctgctgttaagcaacgcatgact

SEQ ID NO: 1499 - DNA, 67 bp, Homo sapiens
  source 1..67: mol_type = other DNA
acactacttggttctgcagtgaataatattttcataatcctaacattgtaaatgctgtttattggtt

SEQ ID NO: 1500 - DNA, 100 bp, Homo sapiens
  source 1..100: mol_type = other DNA
aatagatatcaatctggtgatagataccttagaagccctgacttcaagactatgcaatttacgcttgtcacaaaattgtacttgttccccataaatttat

SEQ ID NO: 1501 - DNA, 305 bp, Homo sapiens
  source 1..305: mol_type = other DNA
ggccgggcacattggctaacgcctgtaatcttagcactttgggaggccaaggcaggcagatcgcctgaggtcagcagttcaagaccagcttgggcaacatggtgaaaccctgtctctactaaaaatatgaaaattagccacgcgtggtggctcatccctgtaatcccagctactcgggaggctgagagaggagaattgcttgaacccgggaggcggaggttgcagtgagccaagatggcactattgcactccagcctgggtgacgagaaactccatctcataaaaacaaaaacaaaaacaaaaaa

SEQ ID NO: 1502 - DNA, 107 bp, Homo sapiens
  source 1..107: mol_type = other DNA
agcctcagttttctcatttgtaatataggggtacccatagggtcattgtgagaaataatagaaataaatcatggaagtgcttggatagtagctggtacttagccctc

SEQ ID NO: 1503 - DNA, 103 bp, Homo sapiens
  source 1..103: mol_type = other DNA
gtaatatctgcttcaaaggggagttatgcaaagtcaacaagagaagacgtgtaaaacccaagcacagtacctggcacaaagtagatgctcccaaatctttgtt

SEQ ID NO: 1504 - DNA, 3291 bp, Homo sapiens
  source 1..3291: mol_type = other DNA
agccaggggggcaagaggggctggctcttactccccgcatcgcggggggcgcggcgctcccctgcgatttgtatcgtaatatccgggggggagaggcgggtgatattacttcccgcatcgcggcgggcgccctctccccactgcgatgtggctcttaatatccagcgggggagagagggtgatattactccctttctcctagtattttttctctactgccacacttggttaacaccctgggacattattttccatattctaggaaggtgtcactgtttaagttccagggggtatacaccctgtgatattattcgtgatattgtagcgaaatgtgaatcctgatgtcacaagtctctacacactctgatattattcgcaataccctagcgggacgttaataataatgtcacaatgtgtgtacagcttgtgctattattattaatctcctaaggggaggttgattttattgtcacacggagtattttccctttggtatgattcggaatatcctggagggatgtcactccttatgtcacagggttcgtacaccttgtcaaattactcgtattacccttataagttatcactcctcatatcaccgagggtgtacactctgtgatactatcgtcatattctagggaaatgttgctttttatgtcacagatgttgcacaccttgtgaaatttttcgttatagttttgtgggatgtgactcctaacgtcacacggggtgtacacacagtgatattacgtgtaatattctatagaaatgttactcgtaaatcacaggtcctgtacacactttaatattcttcgtcgtattctaggaaaacgtgactactaacgtcacagggcgtgtagaccctgtcataaaattcgtaatatcccagcaggagttcactactaatttcacaatgcgtgtacagcctttgatattgttcgtattatccttaagagatgtgactactgatctcccaatgcatgtacattctctgatattattcgttatatcctcgggggatatgacttctaatgtcatatggcgtgtactccctgtgttctatttcatagtatcctagggcaattgtattgttaatgacacagggggtgtacacattgtgatattattcatgatattctagaaggatgttactcctaatgtcacgggggtgtacaccctgtgatagtattcataatttcccaggggtctatattcctaatgtcacagaagataacaccctgtgacattatttgtaatattctgatgagatgattctcctaatatcacagggggtgtacaccctgtgatagtattcttactattctagggcgatggcactcttaatgtcacaggtatgttccttctgtgatattattgaaaatatgctagctggatactactactaatgtcacaatgcgtgtacaccttgtgatattattagtaatattctggggggatgttacccctaacgttacaggggtgtacaccgtgtgatattgctcccaatattgtagggggatgttactcctaatgtcacagtgggtgtacagccttcgatattatttgtaatcttatggagagatattactttaatgatcacagtgggtgtacatacatgggctacaaccactgggatattatttgtaatatcttagggagatataactcctaatatcacagtgggtgtaccccatgtgtgtacatcctgtgatattatttgtaatatccattgtaaacattacttctagtatcccacagagggtacaccctgtgatatttttcataatatcatagggagatattgcttctaataatacagtgggtgtacaccatgtgtgtacactctgtgatgtgatagcttatatcctagggagatattccttctaatatcacagtgagtgtgcaccctgtgatatcattcgtaatctagaaagatgttgctggtaatatcacagatggtgtgcccccagtgacatcattcgaaatatcctagggagatgttactcgtaatgtcacaggggttgtacaccctgttatattattgtaatattctaggggggtgttacttttaaagtcaaaggggtgtacactctgtgatgttattcgtaatatcataggaaggggttattcctaatatcacatgggttatcctaggaagaggttactcctaatatcacactcctcatatcacagcctgtgatagcattcggaatatccaaaagggatggtacttttaatgtcacatggggtgcacaccctttgataatattcgtaagatcctagggacatatgacttcaaatatcacattgggtgtacacacatggtgtacacattgtgtgtgaacacctccagtgatattatccataatatcctaggaaaatgggactcctaatatcacggtcagtggacaccctgtgatattattggtaatatcctaaagagatgttaccactgaggtcacaatgtatgtacgccccctgatattattcgttatatcctcgggggatgttactcctaatgtcacacggggtgtactccctgtgatattattcgtaatatcctagggggatgttactttcagtgtcaccgggggtgtatatcatgcgtattcaacgcctgtgatactattcctaatatcctaggggcatgttcctcctaatgtcacatggggtgaacaccatatgtgtacgcctgctgtgatattattcataatatcctaggggaatattactcctgatggcacaggagatgtacaccatgtgtgtcaaccgcctgtgtcattattcgtaatatcctagggagatgtttccttgaatggcacaaagtgtgcgcaaaaggtcacagaaggtgtgcaccttgtgatgttatctgcaataccctagaaggatgttactcctaatatgtcacaggggtgtacacactttgatattatttgtaatctcatagagaggtatgacttcaaatatcacagtggatgttcacacgtagtgtataccctgtgatattattcataatatcctggggagatgcaactcctgatatcacagtgcatgtacccggtgtgtgtacacccttgatatcagtcgtgatatccagggtaaatatgactcctcatatcacacagtgtgcacaccctgtgatatttttcataatatttaagggagatagcgcttctaatatcaccgtgggtgtaccccatgtgtgtgtactctgtgacagtattttttatatcctagggaggtattactcgtaatgtcacagtgggtgttcaccctgtgatgtcattctta

SEQ ID NO: 1505 - DNA, 126 bp, Homo sapiens
  source 1..126: mol_type = other DNA
actagaatgtaagctccatgagagcaggtaccttgtctgtcttctctgctgtatctattcccaacgcttgatgatggtgcctggcacatagtaggcactcaataaatatttgttgaatgaatgaat

SEQ ID NO: 1506 - DNA, 33 bp, Homo sapiens
  source 1..33: mol_type = other DNA
atttgttgcatatttttcaaaaagtgccaatca

SEQ ID NO: 1507 - DNA, 67 bp, Homo sapiens
  source 1..67: mol_type = other DNA
gagaaatcctcagacacatctgaaggatccggacatggtctgggacttctggagcctacgtcctgag

SEQ ID NO: 1508 - DNA, 7971 bp, Homo sapiens
  source 1..7971: mol_type = other DNA
cgagcaaatagtatttctaaaccaacagtgccacctagtggaaacagaaatcttcatgaggcacatttttttttcttttatggtaacactgcagcttccttttgcaccactagaaatcgggctctaagcctcttctgtgaacaggaaaattctgctttcaacagataggagttaaatgtcttctgtggccaaattttagtctcaatattgtcccatcagcaggaaaatggccgtttggttcctacgttcctttaaggcacctattctgtctctgattaaggtagtactgagctagtaaggggattttaagtccagaagttaaccggaaccatttttctaagggtaaatgctttagcatgggccataatagcaggatatagagttcaatctagcataccccctccattaaaggggccttgcccaattacgtagtttttcttgagatctgttttttttagggaggtacacaggtcgcagaagtctaggaggttgaagggaaatataagcagaggactagagctgcttggggaagtgcgactaggcccaaaagtctagttcctctggtgccatggcttggagggtcacacctacagtcatgggcagcacatttaacagggaggtgggacctaggaactagcgagggaaaatagttgggggacgcccccactgttttcttctccaccctgggtcatatacagaaaggaaggagactaaaaggacacttttattctcacttctctttctaaacgggtaacagatcatctttagcatgtggtcccctggagtggattttaaaacactgggactgcttcaaccctgagactttgaagaaaaaatgcctcatagtctattgcacaagggcatggccttcttatcatcttggagatggacaaacctggcctgcttggtggagccttgattttaatgtcatccaacagttagatcttttctatagacagaagggcaaatggactgaggtcccctatgtatagactttctttgccctgtgaaacccagacctttacaagtcctggacaactgacccagttcttttaccagccatggcaggcaagcccataggcctttcccagagctaaagtaggttccaaaggagcaatctgagacagctattgaatgtcccaatgcttccagtccccctccaattgtaccatcagctcctctagctccaccatttccagtatatcctactctccccatttcactcttactgctgcaggaagtgcttgatgggaatggtgccatgagggttcaagttccctttcattacagaaccttaagcaaataaagggagacttaggccgattttctgacaacccaggtaggtatatagaaattttccaaaatttaactcaggtatttgacctcacatagagggatgttacgttgctgctacgtcagaccctcactgaagctgaaaagcagaaagttctgcaggcagcagaaaaatatggagatgagcaacatgcctcctgtagcaaaccgaggagacaaagaggagatagggaaggtgaggaagaagtggaaactccattcctactaggaaaggaagcagttctggtagacaaccctgactggaacaccagtaactcaggaaatgaatggaaaaggaagcacttttaaggtgtgtattagagggcccatggaaaaccagggccaaacctctcaattactctaaactgtccatgatagaccaaagaccaaacgagaatcccacagcctttatggaaaggctgagagaggcactaataaaacatacctatttatcccgattcaatcaagggacagctcattctcaaggacaagtttattacacaggtagctcccaatattaaaaggaaactataaaagcaagctatagggccagatagtaccctagaaaacctcctaagaaagccacttcggtcttttacaatagggatcaggaggaagcccaataaaaggaaaggaaaatacaggaaaacaacagaggctctagtagcagtggtgcaagcttgcaaagtccagaatccccaaggtgcatccactagctgttatcgatgtggcaaatcagggcattttaagaaagaatgtccaggtagcaagacaaagccacctcgaccctgtccagcctgtggcggagaccactggagacagatctgcccccagagacggaggtcactgggttcagaaccagtctcacagatggtccagcaagactgatgggtcccgggggctcaaacccctagctccagcgactcagactgccattacagcacaggaaccttgggtgattctggaaatcaaaggaaggaaggaaggtagatctccttctggatactggagccagtctctctcttctcctctaatccaggcctcccctcttcccatagtatgactataaggggtgtctcaggaaaaattctaacctgatatttttctcaacctcttacctgcagatggggggacctactatttacacatgcttttaaaatcatggctgaaagtcctgctcctttattaggaagagatagtctagcttgcatgggggccagcatccatacagccccaggacaaactctttgtctcccccgatggaagctaacattaaactacaagtgtgggcaactcaaggaaggataggtcgagctataaccactaggccagtccagatctatcttaaggatctcacttcttttcctaaccagagacagtatcccctgagcccagaggctaggaaagggctagaagccgttattaataacctaaagatgcagggcctcctcaaaccctttaatagcccctgcaacaccccaatattaggagtgcagaagcccagtggggaatagagactagttcaggacctttgcctcattaatgaagctgtagttccaatgcatccagtggtacctaatccctataccctgttaactcaaatacctgagggaactaaatggtttacagtcctagatttaaaggatgcctttttctgcataccattacatcctgattctcaacacctgtttgcctttgaggatttccttccgtccagactgcccagttaacatggacggtgctgcctcagggattttgagatagtcctcatctgtttggacaggcactgtcacaagacatttctgagttctctcatcctcaagttagggtcttgcattagttgatgatattctgctctgtgccccaactgaggaagcttctcaggaaggcaccgaagctcttctcaacttctcagctaacagaggatataaggtttcaaaatccaaggcccagctctgcaaaacctcagtgaagtatctaggattagtactgtccaaggggaccagagtattaggggaagagaggattaagcctatttcctccttccctcacccccaaaccctcaagcaactaagaggattttggggcattacaggattttgtagactatggatacctgggtatggtgaaatagcccgtccattatataacctcataaaagaaactcagggagctaaaactcatcttttaacctgggaacctgaagctcaaaaggccttcaaccagctaaagcaagccttgctcaaggtgccagccctcagccttcctgtagggaaggccttcaatctgtatgtgtcagaaaagaagggaatgtccctgggagttttaacacaggcccgaggaccagctcaacagtcaatgggttacctaagtaaggaacatgatttggtggctaaaggatggccagcatgtctccaagccattgcctcagtggctctactggtcccagaagcctccaaactaatcctgggaaatgatttaactgtttataatcctgggaaatgatttaactgtttacaccccacataacatggcaggactactgcactctacaggggagcctttgggctaacagccgactccttacatatcaggccctgctgttagaaggttccaacatccaattaaagacttgttctcatctaaatccagccaccttcttccccaaggaaactggggaaactgtgcatgattatgaacaagtcatagtacagacctatgcagcaagggaagatactggggaaacttccctagagaactcagactggaccctctccacagatgggagctcttttgtagaacaaggagtatgcatatgcaatggtcactctaaatgacgtcaccaaaagtgcatctctccctccaggcacaagtgctcaattagctgagctaatagctcttacaaaagcaatcacattaagcaaaggaaagagagctaacatttacactgactccaagtatgcttttctggttctccatgctcatgctgccatttggaaggaaaggcatttccttaccaccaatggaccgcctgtaaaatatcaccaggaaattaacaggttattatcctcagtttttcttacacaataaatagcagtgatgcattgcaagggacatcaaaagggaacagatgaggtagccgaaggatacagattagctgatcaggcagctaaatcagtggcaaggaagcctcaagacatcaacacacttcacacccctctaatctgggaaggctccataagagaaattaaacctcagtactcccctacagaaatagaatggaccactttgtctcgagggtataccttttagtcctcaggatggctacagtcagaggatggcaaacaccacttgccagcctccagccaatggaaaatccttaaaatccttcaccaaggttttcacttgggaaaggataaaacttatcaacgtgcccagagattgttttcaggagagaacttaccaaaaacagtcaagcaagttattaatacctgtgaagtctgtcttaaaaataatcccctgaaaatgtgactccttcctcctcaaacccaaagaacaggaagttatccaggggaagactggcaaatagacttcacccacatgtcaaagacaaagggcattcaatacctgctggtatgggtagacaccttcactaactgggtagaagcatttccatgccatccacaaagagcctctgaggtaataaaaatgttagttaatgaaataacttcctgctttggtctaccgaagtaccttcaaagtgacaatgggcccttgtttaaggcagctgtcacacaaggggtctcaaaagcactaggcatagaatatcatctccattgtgcttggagaccccaattctcaggaaaggtggagaaaactaatgatattatcaagagacacctctgaaaattatcccaagaaactcaccttccttgggtcactcttattcccatggccttaacgaataagaaataccccttcaaaattaggtcttagcccttttgagatgctgtacagatggccttttcttaccaatgattttctgttagattgggaaacctctgagctagttaagcatgtaacctctctggctcagttccaacaggaagcgactagcaaaagcccaaccccaggaaactggaccacctctgtttaacccaggagatttggtacttgtaaaggctctcccttctctctctccctccctaagcccaggctgggaaggaccttacactgttcttctttcaagcccctaggcaataaaagttacaggaatcgactcctggatacattatattggagtcaaagcctggagacctgagggagcaacccctgacaacccagaggaatgccttgaatatcaatataaagaaagaggagatcttaagctgaaaatcacaaaagtaactgaatgaaaactacttatcttagtctcacccctacctcaccaaatacttcttgccatttccacctctccttttgagattcgctgccaaatattagaacttctttttgatggaaattatttactacgccacccttgcaggaattgttttactcactctactatttgcagtaggactatatgctgtagcaccctcagggtggaatatcagacagataatctcaattactgtagcattctgcttaattattatcctcatagcaggaataacagttatgaaaaggaagtaaacatgagcgttttactatcactcagtctattaggactttttatcggacttagtaatacatcacaccctttagctcctgcaatatctgccatggtccatttgtacaacaagactaattgttgggtctgtcctaagtggtttgctcagttcagtgacgctaaggaaacttacaatgacccagaattcactgttttaggattccctttattggctttacctttacccttaaagacctagcaggcataaattggacatggtatgggagcaacactctgctcccagtgccggagaacactctgcctgaagataagcttcacatcctcaggctgggacaagactgagtaacagcaaatgcctctctctgctttaaaagcagcgaggaaggaccatgcttgggagatctcaaatattgtaacatcatacttgtaattgatgttagttcaaatatttagggaggagagtgcaacaagggtgatctaaaaggattagaagccctagttggggggctttcagaatctagcctctcattctggttggaagccccgatgggagtggcatgctctaagtaaccaccttgactatattgtaaagaataacagatgggcctttccaaacatgccccctcatggaattccagaccgttgtatcatgtttgctaatagtagcggcttacagatctgtgggcaaactggaggcatctggactgacagcccttgccacaggatcatctgagatactggccagggcatattatgtctctaatttttcgaaactccatttgtcaggtggacgcttctcacttgacatgtcgaattccaaatggcatcgtaaatattgtaaatatggatatccttatcccaaggatgcccctattatatgtaaagaagggaaacttctaagatatcagaaaaatctgccggtgtctctcacaagccacaatttagaactgtctcttcaaggaacagggctacttttttttttgtggctcctggatacatttaatcctcccaaggcattggaagggaacttgtactatagtagcactagttcctgacttattatttttaaattctaccaagatggcagcatcatctggagtcatccctaattgaggctcttttctagagactacactatcttgaatacaccagagaaagagatctatcatttctatgccctcatagggagatttaactgaaagagcagactggggagggcatgcacatgacaatcccatcttagaaaaaccatgaatgggaaattctatagccagaggtctagtctggattacgggcttccctctccttgaaagatcagtacttactatttctattatgatgcaacaagggtggaaggcaactgtaggtaccatagaggcacgacagcaatctacagactctttcaccacagtagcagcacagaatagacggggcttagacgtcctcacagctgaagtaggaggtacctgtgcacttataaatgaaacatgctgcttctggattaacacctctagtaaagcagaggaaaatctacagctacctaaagatcaaatcaaaatcattaagaggctacaagaacacgcaggcttcagccccgggtggctacaattcctctttaatgaattctagtcttctttatggaattggttagctcctttattaagtccactcctacttatatgtcttgtattaatatttggaccttgcatactcaatactataactcaaatcatttcctcttgcctagaagcaatcaatccaaatggtgctgcaaaccgaaccacacgtggacgtgccattcttccgaggacccttagatcaaccccaggaggagccctagctgttgttccccacttgatgtcccttttcggcaggaagtagccagaaagagttcttgcccaaaaccccctaacagcagttagggtgacatctcctcaggaagggaa

SEQ ID NO: 1509 - DNA, 115 bp, Homo sapiens
  source 1..115: mol_type = other DNA
agctatggtctgcttagtcctatgattttgaacaaatcaaaacttctttggaccacaattttcctagctgaaaaattaaacatttggatcatttgatttctcatatcccttttag

SEQ ID NO: 1510 - DNA, 130 bp, Homo sapiens
  source 1..130: mol_type = other DNA
agaaaatccaagctgtgattcttgcagtgcagtgccataacaagctgtgaaactttggacaatacttcttggacttggtgtccagtttacataatgaagaagctgggctagatgatctctgaagcccctt

SEQ ID NO: 1511 - DNA, 222 bp, Homo sapiens
  source 1..222: mol_type = other DNA
ggttaggagtatggactgtggagccagacagcctggattccgcttctggctctgtgacttacctgctgtgtgactttgcaaatgttacttgacttctctgtgccttgatgtcctagtctaccaattggggataataatagaatcaattcttagggtcacggtgaagatcaagtagaagtatgaagtgtgtagaacagtttttcacaggtggtgatcactcag

SEQ ID NO: 1512 - DNA, 2491 bp, Homo sapiens
  source 1..2491: mol_type = other DNA
ttatataccatgacataaatgagggatatataccaagtatgcaagactggttcaacatttgaaaaatcagctaatataatttatctacatcaacaggctaaagaggaaaaatcacaatagatacagaaaaatcacctgacaaaactcaacactcatttattataaaaactctcagtacactaggaatggggtgggggggagcttcctccacttaataaagaacatctacaattacctacagccaacaacacacttaatggtcagaaactcaaggctttcccgctaagatgaggaacaaggcaaggatgtcccctctcaccttttcttttcaacactgtactgaaaatcctagcttacgcagcaagtcaagaaaaggaaataaaaggtatacagattgggaaagaagaaataaaactgtctttgcagatgataagattgtctatgtagaaaatctgaaagaattcaccaaaaaaaaaggaaaaaaaaaaaagaaaaaaacctcctggaaccaacagcaagactataggatagaagactgatatacagaagtcaatcaccttcctatataccagcagtgaacaagcgcgattttaagttaaaaagataataccatttacattagcacctccaaaaatgaaatacttaggtataattctaacaaaatacgtacaagatctataagaggaaaactataaaactctaatataagaattcaaagaagaaataaatagacattccatgttgagaaaaaggctcaatattgtcaagatgtcaggtcttccaaagttgatctacagattaacaaaatcccaatcaaaatcctagcaagttattttgtggatatcaacaaactgattctaaagtttatttggagtggcaaaagacctagaacagtcaacccaatattgaagaagaacaaagccgaagaactgccactactcaattcaagtcttactataaagctgtaataatcaagacagtgtgatactagcaaaagagtagacagatcagtgaaacatgatgaagagcctagaaatgacccaggtacatatgtcaactgatctttgacaaaggagcaaaggtaatacaatagagaaaagatagttgtgaacaaatggtgctggaacaactagacatccacatgaaaaaataataataatctagacacagaccttaccaattttcaccaaaatttattcaagatggattatggacctcaatgtaaaatgcaaaactataaaactcttagaagataacattttaaaaaagctagatgaccttgggtatagtgataactttttagatgtaacatcaatgttagtacccatgaacaaaacaattgataagctggacttcattaaaatgaaaaacctctgctctgtgaaagagaagagaaaccacagactgggaaaaatactaataaaagacatatctaataatggactgttatctaaaatatactaagaaccataaacactcaaaaataagaaaatgaacaacctgattaaaaaacagacacctcactaagaagatatgcagatggcaaataagcacatgaaaagatgctcaacatcatatatcattaggaaattacaaattaaaacaacagtgagattccatacacacctattagaatggttcaagtcaaaacattaacaagatcaaatgctggcaaagatgtggaagaacagaaaatctcattcattgcggtgggaatgcaaaatggtaaggccacttggaagacagtttggcagttcttacaaaactaaatatactcttaccatagaacctagcaatcatgctccttggtatttgcccaaatgagttgaaaacttacatccacataaaaacctgcagacagatgtttatagcaacttttattcataactgcagaaacttggaagcagccaagatgttctttggtaggtaaaacaataaatcaactgtggtacatccagacaacagaatattaatcaacccccccgccccaccaaaaaaagaagaaaaacaagaaaaaaaaaaagctatcaggtcatgaacatacatgagagaatcttaagtgtatattactatgtgaaagaagccaatctaaaaggcttggaatcaactacatgtcattataggaaaggcaaaactatggagacagtaaaaagatcagttgccagaggtttggaggaagggaaaataaaaaggcagagcacagaggatttttagggcagtgaaactactctgtatgatattttaatggtatatacatttatcaaaacccatacaatatacaacaccaacagtgaatcctaatgcaaactataaactttgggtgataatgatatgtcagtagagcttcaccaatgaaaacaaatgtactattctagtacaggatgataatagttggggaggctacgcatgtggggaaggagtatatggaaactctctatattttccattcaatttttctgttaacctaaaaccatgctaaaaaatatctatt

SEQ ID NO: 1513 - DNA, 128 bp, Homo sapiens
  source 1..128: mol_type = other DNA
gtgggaagaacatgagttttgcagccagtcactcctgagatccaaatgtggtcaagtcactgacccctctgaacctcattttccacatctgtaaaacagagaatcataatgccttcttcacagagatg

SEQ ID NO: 1514 - DNA, 2138 bp, Homo sapiens
  source 1..2138: mol_type = other DNA
gggcattcagttgagatcccagaaaggccaatccttagaaacaggactgctctagccctagcctatgggctattcctggcctactttaacaaagcttagaaacaagcctcagcaggatcaagctaaaccacaaataaattaaatgcttgccttagcaatactcaacaccctaaaggaaaacaacataatccaaactcaacattgtagcattcataaggcccagcattcaataaaaaaattactagacatacaaagtggtaagaaaacgtgacccacaacccagcgaataaagtcagtagaaatgggactagagatgccacagttattgacagtagcagacaaagactttaaaacagctagtagaaataagttcaagaattaaaaggaaggatggacacattaataaagaaatctcaatggagaaagagaaaccttaaaaagagacaagtggaaattacagtactagaaagcatacttcatgaaataaaaaattcaccgtatctaatgcttaacattagattgaataatgcataagaaaacatcagtgagcttgaaaacaggtcaacagaaattatctaaactgcactgagaaaaaaagcattaaaaagtataaagactcggtgatctgtcggaaaacatcaagcagtataatacatgtgtaagtggagtcccaaaagaagagagaaaaaaatgagacaggaaaagaagttgaagtaatggccactttccccaaaatttgatgaaaaaatgtcaacatacaaatccaagaaattcaataaaacttatttaagagaagcacaaagaaagccacacctaggcatatcataatcaaattgctaaaaactgaagataaagaacatttaaaaagtagccagggaaaaaagacaggttacaaaaaaaggaataatgagaagtattcctatttttttttatcagacataaaactagtcagaggataattggcagcatctttgaagtgattaaataaaaaacaaacaaaactataataaaaaaccccagtcaacccataaatctatatccaggaaaaaggtagtcttaaaaagtagaataaaggcatttccagagaagcaaaagctggatgaatcattaacatacatgcatttcaagaaatgttaacggaagtcctcaggcagaaagaaaatgattccggatgatattagatctgcattaaaaagactaccagaaatggaaaatatgtggggcataaatataaaagacattttttcttatttcttagtttctttaaaaaaacatttgagtgcttaaaccaaaaatagtagcaaagtattgtgaggtgtataatctgtgtagaagcaaaatgtatgacaattgcacaaaagatgagggtgggtaaatgaaagtatattgttgtaaagttcttacatttatgtgaagtggcataaagttaattcaaggtagacagtgataaattacgtttattttaatccccaaagcacccactaaaagttaaaacaaagaggcatagctaaaaagctaatagagaagatagaatgaaatactagaaaacacccaactgatccaaaagaagacaggaagaggaaaataagaaacaaaggacaaggggacaaagagaaaacaaatagcaagatggtagaatcaaacccaatcaaattactgattatattctatctagcttgactaaaccttccaatgaaaagagcaagagagctagactagattttaaaaagtgagattgaactatatgatgtttataagcacatgctttaaatatgaagatacatacaacttaaaagagaatagaaaagagaaccatgtgttgactaattgtaaaaacacaggagtggctatattgctatcagacaaagacaaggagaattaccagggatagagagtgacattacataataagaaaagaatcaattcattgagaagacatgcaattcctgaacactcgctaacaaacttcaatgtatatgaatgcaaaactgatagaattgaaaggagaaatagacaaattaataataagtgttgaagagatttactctcctctctcagtaactgatacaacatacaaacaaaaatcagaaaacatgtagaggatgtgcataactctaaacaaacagaacctaattgac

SEQ ID NO: 1515 - DNA, 814 bp, Homo sapiens
  source 1..814: mol_type = other DNA
aaattaacaacttctatttattaaaagattctatgagaatgtaaaaaggcaatccacagagtgcaagacagtatttgcaatacatatattcaacaaagaactcatttccataatatataaagaagtctttaatattaataagaaatatatataacactcaacagaaaaaggatgaaaactgttctaagcacttcacagaggaggatctccaaatgccaataaacataaaaggtatgcaatcttattattcatcaggaatatgcaaaataagaccaacaagatgctgccacccacttaacagaattgctatcattaaaagaccaataataccaagtgctggcaagtatttgaactgatacaggactttcataccttcttggcagaaatataaattgggacaacctacaaacagtgaatatatacataccctcttccccattaattctgcctctaggtacatataactaagaaaaatgtggacatatattcaccaaaagacacatacaaaaatgtgatagcagtactacttgtaatagccccaaatttgcaaatcaaatggccatcaacataaattgtagtgtagtcatccaatggaatgatatgcagtagtaaaaatgaaactaccattatccatcacaacacgattgaatcatacaactgtaatgtcgagcaaaagaggaaaaatttagcttgatgatagaagtcagaatagtggttacctttgggaacaggcaggcagcgacagtgaggggacatgaggggacaattgttacacagctgtgctcactttgtgaaaatgcattgaactatacac

SEQ ID NO: 1516 - DNA, 509 bp, Homo sapiens
  source 1..509: mol_type = other DNA
gacacctgttcctttttggctgtccagaatctaatcccccttcttttgacaattccgccatcccttcttctttctgccaggatgactcaccctggctcaggactagggcatgtgatttaggtttaagcccattgaggtattgcatttccttggactccaatgactggctcattgataattatgtgacttaattagagccaattagagacacaatgagacttttgcagggaattctgggaaggagactctcactagatccttgcttgacttgagaggtatgaggttggaacggctgtagccatctccatctattgagggaacacgggtttgagaacacagtcaagtcaggacgagaacaagagacgctggatcttgaggacagtgcttgagccctcgaatcaatcaatgtctaaagtaagtcctgatttcagacattcagtacatgattcaataaaatttctttgagcactatcttaggttggattttctctttctcacaaccaaaaaag

SEQ ID NO: 1517 - DNA, 132 bp, Homo sapiens
  source 1..132: mol_type = other DNA
ttctagtcctgacttcacctttttgatttggtgtgtgccctagggtatgtacccttccccatctgagcctcggtgtgtccatgtgtctggcgggggatgggtggactgtatgatttccaaggactctaccag

SEQ ID NO: 1518 - DNA, 2270 bp, Homo sapiens
  source 1..2270: mol_type = other DNA
gcaagatggtggagtaggaacagctctggtctgcagctcccagcgagaacaacacagaaggtgggtgatttctgcttttccagtgaggtacctggttcatcccactgggacgggttagatagtgggtgcagcccacagagggcgagcagaagcagggttgggcatcgcctcacccaggaagcacaaagggttggggaactccctcccctagccaagggcagccatgagggacggtgctatttagcccagataccatgtttatctcacggtcttcgcaatctgcagaccaggagattcccttgggtgcctttaccaccaggaccctgggtttcaagcacaaaactgggtggccatttgggcagacactgaactagttgcaggagttttttttcatacccagtggcacctggaacaccagcgagacagaaccattcactaccctggaaagtgggctgaagccagggagccagatggtcttgctcaatggatcccactcccatggagcccaacaagctaagatccactggcttgaaattctcgctgccagcacagcagtctgaagttgacctaggaagcttgagcttggtggggggaggggcgtccaccattgctgaggcttgagtagtctgttctcccctcacagtgtaaacaaagccactgggaagttcggactaggcagagcccataacagtgccacaaagccgctgtagccagactgcctctctacatttctcctctctgggcagggaatctctgaaagaaaggcagcagccccagtcaggggcttatagataaaactgccatctccctgggacggagcacatgggggaaggggcagctgtgggtgcagcttcagcagacttaaatgttcccgtatgctggctctgaagagagcagaggatctcccagcacagtgctcgagctctgctaagggtcaggctgcctcctaaagtgggttcctgacccctgtgcctcctgatggggagacacctcccagcaggggtcgatagacacctcatacaggagagctctggctggcatctggtgggtgcccctctgggaggaagcttccagaggaggaagcaggcagcaatctttgctgttcttcagcctctgctggtgataccagggcaaaagggtctggagtggacctccagcaaactccaacagacctgcagaagaggggcctgactgttagaaggaaaactaacaaacagaaagcaatagtatcaacatcaacaaaaaggatgaccatgcaaaaaccctattcgaagcttaccaacatcaaagaccaaaggtagataaattcacaaatatgaggaaagaccagtgcaaaaaggctgaaaattccaaaaaccagaatgcctcttctcctccaaaggatcacgactcctcgccagcaagggaacaaaactgggcggagaatgagtatgactaattgacagaagaaggcttcagaaggtgggtaataacaaactcatccaagctaaaggagcatgttctaacccaatgcagggaagctaagaaccttgatatgaggttacaggaactgctaactagaataaccagtttagggaatgacataaatgacctgatggagatgaaaaacacagcacgagacctttgtgaagcatacacaagtatcaatagctgaatcgatcaagtggaagaaaggatatccgagattgaagatcaacttaatgaaataaagcatgaagacaagattagagaaaaaagaatgcaaaggaacaaacaaagcctccaagaaatatgggactatgtgaaaagaccaaacctatgtttgattggtgtacctgaaagtgacagggagaatggaaccaagttggaaaacacacttcaggatattatccaggagcacttcccctacctagcaagacaggccaacattcaaattcaggaaatacagagaacgccacaaagatactcctagagaatggcaaccccaaggcacataattgtcagattctctacggttgaaatgaaggaaaaaatgttaagggaagccagagggaagatcaggttatccacaaagggaagcccatcagactaacagcagatctctctgcagaaaccctacaaaccagaagagagtgggggccaatattcaacattcttaaaagaattttcaacctagaatttcacatccagccaaactaagcttcataagtgaaggagaaataaaatcttttccagacaagcaaatgctgaggaattttattaccaccaggcctgccttacaagagttcctg

SEQ ID NO: 1519 - DNA, 159 bp, Homo sapiens
  source 1..159: mol_type = other DNA
ggtggtgcgtgcctgtgatcccagctacttgggaggctaaggcatgagaatcactggaacccaggaggcagaggttgcagtgagctgagatcgcaccactgcactccagcctgggcgacagactgaggctgtctcaaaaaaaaaaaaaaaaaaaaaaaa

SEQ ID NO: 1520 - DNA, 166 bp, Homo sapiens
  source 1..166: mol_type = other DNA
tgtaaaatacaaggactctggcgccagccagaactcgctttgaatccagatctgtcacttcccagctgcatggcccatggcaaatgacttcacctttctgagccccagtttttcctcagtaaacagggcagtcactttccgcacggttgaggtgcagactaagcga

SEQ ID NO: 1521 - DNA, 344 bp, Homo sapiens
  source 1..344: mol_type = other DNA
gctgggcgtggtggctcatgcctgtaatcccagcacgttgggaggctgaggcgggtggatcacttgaggtcagaagtttgagactaccctggccagcatggtgaaaccccgtctctactagttagcatttcaaagtctcatttgttatcggaattaaccagacaaagaatggccatgcaccaccacccacagaattgagaaagagctatcaatctgtcaatcctgtccgtgtccaggctgggtgaggtttcccgtgttgagattgcagtgagccaagattgagccattgcactccagcctgggtgacagagtgagattccatctcaacataaataaaataaaga

SEQ ID NO: 1522 - DNA, 289 bp, Homo sapiens
  source 1..289: mol_type = other DNA
gccgggtgcagtggctcacgcctggaatcccagcactttgggaggccgaggtgggtggatcatgaggtcaggagatcgagaccatcctggccaacatggtgaaaccccgtctctactaaaaatacaaaaattagctgggcatggtggcatgcacctatagtcccagctactcaggaggctgaggcaggagaattgcttgaacccagaaggcggaggtgtgccgagatcgcgccactgcactccagcctggtgacagagcgagactccatctcagaaaaaaaaaaaaaaa

SEQ ID NO: 1523 - DNA, 167 bp, Homo sapiens
  source 1..167: mol_type = other DNA
agagaggcagcccccagagtgcaggtgagacacatgggatgttaaagacagatcccaattctcattccagctccaccactggctagctgggggcctgacagctcctgacctctgagcctcatcatctttgcctgggagtgctaatactcaccttaacttgggtgttg

SEQ ID NO: 1524 - DNA, 38 bp, Homo sapiens
  source 1..38: mol_type = other DNA
ggagcctctgagcctactctagttcaagaggctacctg

SEQ ID NO: 1525 - DNA, 190 bp, Homo sapiens
  source 1..190: mol_type = other DNA
cccttcttcacctacataagaacccaaatgccttcagctatttcccacagaacccatacattttcccaaataaattatttagatcacttaacttggagaaaaagtggaggactaaatagcatcaggcgagacgagagctccctaagggcaaggatagtatctccttcccctctgcaattcagtgcctagc

SEQ ID NO: 1526 - DNA, 103 bp, Homo sapiens
  source 1..103: mol_type = other DNA
ctggcgtgggtagctcacgcctgcaatcccagcactctgggaggtcgaggcaggagtggatggccaacacagggagaccctatttgaaaacaaaaaacaaaaa

SEQ ID NO: 1527 - DNA, 41 bp, Homo sapiens
  source 1..41: mol_type = other DNA
gaaagacagaaattttcagatttgaaactcaacggacccca

SEQ ID NO: 1528 - DNA, 975 bp, Homo sapiens
  source 1..975: mol_type = other DNA
aaagaaactaccatcagagtgaacaagcaacctacaaaatgggagaaaattttcacaacctactcatctgacaaagggctaatatccagaatctacaatgaactcaaacaaatttaggagaaaaaaacaaacaaccccatcaaatagtgggcgaaggacatgaacagacacttctcaaaagaagacatttatgcagccaaaaaacacatgaaaaaatgctcatcatcactggccatcagagaaatgcaaatcaaaaccactatgagatatcatctcacaccagttagaatggcaatcattaaaaagtcaggaaacaacaggtgctggagaggatgtggagaaataggaacacttttacactgttggtgggactgtaaactagttcaaccattgtggaagtcagtgtggcgattcctcagggatctagaactagaaataccatttgacccagccatcccattactgggtatatacccaaatgactataaatcatgctgctataaagacacatgcacacgtatgtttattgcggcattattcacaatagcaaagacttggaaccaaatgtccaacaatgatagactggattaagaaaatgtggcacatatacaccatggaatactatgcagccataaaaaatgatgagttcatgtcctttgtagggacatggatgaaattggaaaccatcattctcagtaaactatcgcaagaacaaaaaaccaaacaccgcatattctcactcataggtgggaattgaacaatgagatcacatggacacaggaaggggaatatcacactctggggactgtggtggggtcgggggaggggggagggatagcattgggagatatacctaatgctagatgacgagttagtgggtgcagcgcaccagcatggcacatgtatatatatgtaactaacctgcacaatgtgcacatgtaccctaaaacttaaagtataataataataaaaaaa

SEQ ID NO: 1529 - DNA, 886 bp, Homo sapiens
  source 1..886: mol_type = other DNA
acttctactactcgataagatggagaaacaaggattgaatttattctgccacctgaaatgtctaaaaaaaccaaaaaaacaagatctatgaaataaccactttcaaacactggagatcaggtggtgtgggacctcatctctgatatctgagaagaaaatcatatgaggtaagccctatggctatttagcttactgtatggagtttccaaggcatatcttaggaaggagaaacaggcagagtctagtagtttccctgatttgagaagacaagcaaggagttttgggaggccaagatgactggagcttgtatgacagagtactagggagaagacagccacaggagcacacagtatgagagatctgcagtgggtatcccttgagatttcagcttggtcaatgcatgagtggaacgaaactgttgaaaaggaacaggaaaagaagtacccaaaagaagcagatgtaacaatttctgaggctcatacaggactgtgtataatttcaattcccaaaaatccgactagaaaacttcataattcatgaagtatcagggagactactctgcaaggtatttcttccgcagtaggacaaaattagccctagttctgctcccacctaataaataaaagcaagcttcgaaagtataaaatggtttccatgtaaaatatgaacatactagaacaaagctcaagaatattgataggaatgtaaaaatttctggcacccaaagttgtgaaattaacaaagcttgatatctaataaaaaaatcagcaggcacttaaaaagtggataaatatgacccataatgactagaaatatcagtgaatagagacaggtccagaagtgagagagaagatagaactagcagtcagaaacattaaaagtcatt

SEQ ID NO: 1530 - DNA, 307 bp, Homo sapiens
  source 1..307: mol_type = other DNA
gccaggtgcagtggctcaaacttgtaatcccagcactttggaaggccgaggcaggtggatcacgaggtcaggagttcgagacccgcctgaccaacatggtgaaaccctgtctctactaaaaatacaaaaaaaaaaaaaaaaatttagctgggtgtggtggcgtttgcctgtaatcccagctgctcaggagactgaggcataagaatcgcttgaacctgggaggtggaagttgcagtgagctgagatcgcaccactgtactccagcccaggcgacagagtgagactcagtctcaaaaaaaaaaaaaaa

SEQ ID NO: 1531 - DNA, 199 bp, Homo sapiens
  source 1..199: mol_type = other DNA
cctcgcccctgctccctcccatcccttccccctttactcatagcacttcccccattggacacgtggtgcattttgcttgtttattatgttttctctccatcagaatgaaagctcctcgagggcagggactttggtctattgtctgtatttgccggtgcctaggattgtgcctgtatgcaacaggcactcaataaatatt

SEQ ID NO: 1532 - DNA, 93 bp, Homo sapiens
  source 1..93: mol_type = other DNA
tagctctgcctcagcctacttggggttgtggggagggtcttaggtaaaccaattcctccctaagcctcagcttcctcatctgtaaaatggggg

SEQ ID NO: 1533 - DNA, 159 bp, Homo sapiens
  source 1..159: mol_type = other DNA
aggcactgaattatcagtagtaaaaacacactctgtagaaaaactagacattggtttagattctggctgttacctgtattaccttggacaagtccctagagctctctgagtctgtttcccagaagtaaaatgggtcacaaacctggctagctcccccca

SEQ ID NO: 1534 - DNA, 476 bp, Homo sapiens
  source 1..476: mol_type = other DNA
gtgacagttaatttgtgtctcaatttgtctaggtgactgggtacctggatatgtgatcgagtattcttctgggtgtttctatgaggatgtttttggatgaaattggcatttaaattggtaaactgagtaaagcagtctgtccccctaaccggggtgggcttcatgtaatcagctcaaggtttgaatacaacaaaaagacttacactctcgcaagtgaaaggcaattctttctgcctggtagccttcaaactgagacacaggcttttatcctgccttcagattcgcctgggaacactggctcttcctgagtctcaagcctgctggccttgagacaagaactacatcagctctctcagttctcaagcctttggacttactctggaactaagccatcagctctcttgggtcgtcagcttgccaaccaactcatcctgaagatcttgggacttgccagccttcatagtcacgtgggccaa

SEQ ID NO: 1535 - DNA, 291 bp, Homo sapiens
  source 1..291: mol_type = other DNA
atgcctgtaatcccagcactttgggaagctgaagtggagggttgcttgagctcaggagttcaagaccagcctgagcaacacagtgaaactccgtctctacaaaaaaaaaattttttttaattagctgggcatggtagcatgtgcctgtagtcccagctacttgggaggctgaggtgggaggatcactcaagccctggaggttgaggctgcagtgagccataatcgtgccattgcagtccagcctgggcaacagagtaagaccccatctcaaaaaaaaaaaaaaaaaaagga

SEQ ID NO: 1536 - DNA, 171 bp, Homo sapiens
  source 1..171: mol_type = other DNA
agctggatgcagtggctcatgcctgtaatcccaacacttttgggaggtccaggcaggaggatcacttgggcccaggaggtcaagcctgcagcgagctgagatcacaccactgcactccagcctggggtgatagaacaagaccctgtctcaaaaaaaaaaaaaacaacaaaa

SEQ ID NO: 1537 - DNA, 161 bp, Homo sapiens
  source 1..161: mol_type = other DNA
gccgggcgtggtggcacgcgcctgtaatcccagctacccaggaggctgaggcaggagaatcgcttgaaccggggaggtggaggttgcagtgagctgagatcacgccattgtactccagcctgggcgacagagcaagactccatttcaaaaaaaaaaaaaaa

SEQ ID NO: 1538 - DNA, 123 bp, Homo sapiens
  source 1..123: mol_type = other DNA
ggaggattacttgagcccaggaggtcaaagctgaggtgagccatgattactccactgcactccagcctgggcaacagagccaggccctgtatcaaaaaaaaaaaaaaaaagaaaagggaaaaa

SEQ ID NO: 1539 - DNA, 151 bp, Homo sapiens
  source 1..151: mol_type = other DNA
gtggagtacttgggcctccagcatcagaaaaacctgcaggaacatgcagattcctgagcctccttattccctacagaatcaagactgtctggggcagacctgagaatctgcattttaagaagatgattctcaggcatcccgaagattgaga

SEQ ID NO: 1540 - DNA, 125 bp, Homo sapiens
  source 1..125: mol_type = other DNA
gccaggtgtgttggttcacacctgttgtaatcccagcactttgggagggtgaggcaggagcactgctcgagcccaggctgggcaacatagcgagaccttgtctctatttacaaaaaaaaaaacaa

SEQ ID NO: 1541 - DNA, 126 bp, Homo sapiens
  source 1..126: mol_type = other DNA
tgggtgccatgaatcacacctgcaatcccagcactttggaaatctgtggtgagaggatctcttaaagctatggccttgaaaccagcctgggtaacaaaaccaagcccttgtatctaaaaaacaaaa

SEQ ID NO: 1542 - DNA, 229 bp, Homo sapiens
  source 1..229: mol_type = other DNA
aggccaggcgagttcaaaaccagaccggtcaacatgttgaaaattgtctctactaaaaataaaaaaattatctgggtgtggtggcacacggctgtagtaccagctactcaggaggctgaggcacgagaatcgcttgaaccctgggggaggaggctgcagtaagctgagatcgttccactgcactgcagcctgggtgacaagagtgagactccatctcaaaaaaaaaaaa

SEQ ID NO: 1543 - DNA, 124 bp, Homo sapiens
  source 1..124: mol_type = other DNA
ctgggagaggggggatcttgactgacattttagatcctgtctgctgctcactgattatgactgtggacgcgtctccctgcttctctgggtctgtttcttcatctctaaaataggtatgctaaca

SEQ ID NO: 1544 - DNA, 133 bp, Homo sapiens
  source 1..133: mol_type = other DNA
tataaaagtgatgactccaggaccacagcccataccacctgaggcaatccctgggtacaaagctaggaatctgaactttttaaacaagcctgctaggtaagtcttatgcactccaaggtagatgagaaccact

SEQ ID NO: 1545 - DNA, 285 bp, Homo sapiens
  source 1..285: mol_type = other DNA
agtggctcacgcctgtaatcccagcaccctggaaggccaagacaggcggattcccagaggagttgagaccagcctggtcaacatggcgaagccctgtctctactaaaaatacaaaaataagccgggtgtggtggcacatgcctgtaatccctgctacttgggaggctgaggcaaaagaatcacttgaacccaggaggcggaggttgtagtgagccaagattgcgccactgcacttcagcctgggtgacagtacaagagtccgtctcaaaaaaaaaaaggaataaa

SEQ ID NO: 1546 - DNA, 301 bp, Homo sapiens
  source 1..301: mol_type = other DNA
ctgggcggggtggctcatgcctgtaatcccagcactttgggaggctggggggagtggatcacctgaggtcaggagtttgagaccagcctggccaacatggcaaaaccccacctctagtaaaaaaacaaaaattagccaggcgtggtggtgtacacctgtagtcccagctactcaggaagctgagacaggagaatcgcttgaacctgggaggtggaggttgcagtgagcgagattgcaccactgcactccaacctgggcgacagagcgagacctctgtctcaaaaaataaaataaaataaaa

SEQ ID NO: 1547 - DNA, 90 bp, Homo sapiens
  source 1..90: mol_type = other DNA
tgtgggacctttagaaagtctcccctttctgggccgcagttttttcaacttacataaaaagaggatctgcctcacggaggggcagggagg

SEQ ID NO: 1548 - DNA, 178 bp, Homo sapiens
  source 1..178: mol_type = other DNA
cgcaccagcgatctggggtgcggggctcggcctccctgcgctcctggctgaccgtgtgaccttgggcaagtctggcctgctgggccttagtttccctctctgcagcagggacttgggggtggtgaacttaatgagccgtatactcccacccagcgctcacttcctgaggctttgtgac

SEQ ID NO: 1549 - DNA, 132 bp, Homo sapiens
  source 1..132: mol_type = other DNA
tattttattttctgcatctttaaatggtctcattcattcgtgtattgtctgtctcccacttctagattgtgagtgccacggggctgaggcctgcgccgacctggtctgctggtgctaccaggcttgaacagt

SEQ ID NO: 1550 - DNA, 83 bp, Homo sapiens
  source 1..83: mol_type = other DNA
cgctgaactccagcacctagaactatgtcacactcgtagtaggccgctgcattggttgaacaaatgattttgaaagaatgaat

SEQ ID NO: 1551 - DNA, 131 bp, Homo sapiens
  source 1..131: mol_type = other DNA
caggatggcatagtgaaggccctgaatgtggaaccagatggcacaggcctcacctgcagcctggcacccaatatcatctcacagctctgaggccctgggccagattacttcctccacccctccctatctca

SEQ ID NO: 1552 - DNA, 304 bp, Homo sapiens
  source 1..304: mol_type = other DNA
gctgggtgcagtggttcatgcctgtaatcccagcactttgggaggccgaggtgggcagatcatgaggtcaggagatcaagaccatcttggccaacatggtgaaaccccatctctactaaaaatacaaaaattagctgggtgtggtggcgtgcacctgtagtcccaggtacttgggaggctgaggcagaattgcttgaacccaggaggtggaggctgtagtgagctgagatggtgccactgcactccagcctgggcaacagagcaagattccatctcaaaaaaaaaaaaaaaaaaaaaaaaaaaa

SEQ ID NO: 1553 - DNA, 213 bp, Homo sapiens
  source 1..213: mol_type = other DNA
gcagctgcagcaggtgagggctgagccaatggggcaggactgggctaggccagacttgacttgctgtgggaccctgggcaggggcactttcccttcctgagcttcagcttcccctcctggaaaaatgggttagtaattcctggcctggcctttcccagggctcttgggagagtagaattgagatgtgaaattgctttgactccattaaagggc

SEQ ID NO: 1554 - DNA, 295 bp, Homo sapiens
  source 1..295: mol_type = other DNA
gaccaggcacatggctcatgcctataatcccaacgctttgggaggccaaggtgggcggatcacttcgagtcaggagtttgagaccagcctggccaacatggtgaaaccccatctctactaaaaatacaaaaattagcaggctgtggtggtgggcgcctgtaatcccagctactcaagaggctgaggcaggagaatcccttgatcccagaggtggaagttgcagtgagccaagatcatgccactgcactccaccctgggcaacagagtgagactccgtctcaaaaaacaaaaaaga

SEQ ID NO: 1555 - DNA, 81 bp, Homo sapiens
  source 1..81: mol_type = other DNA
tcagttcctgactccccaacttggtctctgccctgaagcagggcactgaactctgggctgcttctctgtgtgtaaaatggg

SEQ ID NO: 1556 - DNA, 91 bp, Homo sapiens
  source 1..91: mol_type = other DNA
ctttctggaatcttgcttcctcatctgttaagtgaggctaataccgcttactcatagttttgttgtgaagatgaactaagagcatgacata

SEQ ID NO: 1557 - DNA, 301 bp, Homo sapiens
  source 1..301: mol_type = other DNA
ggccggccgtggtggctcacacctgtaatcccagcacttttggaggccgaggcgggcggatcacaaggtcaggagttcaagaccagcctgaccaatacagtgaaaccccgtctctacttaaaatacaaaaacaaaattagctgggcgtggtggcgcatgcctgtaatcccagctactcgagaggctgaggcaggagaactgcttgaacccgggtggcggaggttgcagtgagcctagatcgctccactgcactccagcctgggtgacagagcgagactctgtctcaaaaaaaaaaaaaaga

SEQ ID NO: 1558 - DNA, 76 bp, Homo sapiens
  source 1..76: mol_type = other DNA
agaggccctgctgcagctgcagtttgatgatgaagacctgggggccttgcttggcaacagcacagacccagctgtg

SEQ ID NO: 1559 - DNA, 56 bp, Homo sapiens
  source 1..56: mol_type = other DNA
cctgactgggtggttgtgaggatgcaaggagaaaaggtgcaccaaggtgcttccta

SEQ ID NO: 1560 - DNA, 99 bp, Homo sapiens
  source 1..99: mol_type = other DNA
ttaaaaacacaggttgccaaggcaggctgcctagttcctatcatggccctgccacttggcagttctatgccctccacttctctgtgcctcagttccctc

SEQ ID NO: 1561 - DNA, 167 bp, Homo sapiens
  source 1..167: mol_type = other DNA
ctggacagcgccaggaggccctgggttccattcctaactctgcctcaaactgtacatttggataagccctagtagttccctgggcctgtttttctataaaacgaggcaactggactgttagtggttttcaatcttttcttttaggaagttttatttatttttattat

SEQ ID NO: 1562 - DNA, 242 bp, Homo sapiens
  source 1..242: mol_type = other DNA
gaggtagctgtggtgttgaaacactggacttggatatggggtgctgggatcgattcctagctttaccactaactagctgtgtggccttgagtaaatcccgttacctctctgagcctcggttaccctgtctgtaaaaagggaggtgagaatacctacctcacggaactgttgggaggctcagatgagatgctatatgtgaaaacattctgtaagcttcgtacaaatgtgaagtattaatatta

SEQ ID NO: 1563 - DNA, 297 bp, Homo sapiens
  source 1..297: mol_type = other DNA
gcagtggctcactcctgtaatcctaacactgggaggctgaggcgggaggatcacttgagcccaggagttcaagaccagcctaggcaacatagcaagaccctgtctctacaaagaaaattaaattagcagggtgtgatggggagcacctgtgatcccagctactcagaatgctgaggttggaaggattgcttgagcccaggagttaaaagaggctgcagtgagctatgatcacaccactgtattccagcctgggcaacagagtgagactgtctctcctttatttaaaaaaaaaaaaaa

SEQ ID NO: 1564 - DNA, 65 bp, Homo sapiens
  source 1..65: mol_type = other DNA
agttctgcaatactgggcctgccgcctaccctcgctgagcctcagtttgctggcctgtgaagtgg

SEQ ID NO: 1565 - DNA, 235 bp, Homo sapiens
  source 1..235: mol_type = other DNA
gggctgtgtggtgccgtgatgcagctgtgggtttggccaccgacagacctgggctcaaattggacctgctgcttttgactgtgagaccttccataagctccttttgctccaagcctcagttttctcctctgtgaaacagagaaaatcgttcctatcagagttcttatgaggatgaaatgggattttggatgtaaaatgcttccatccagtacctgctaaacaaaatgcttactaa

SEQ ID NO: 1566 - DNA, 293 bp, Homo sapiens
  source 1..293: mol_type = other DNA
gccgggcgcggtggctcacgcctgtaatcccagcactttgggaggctgaggcgggcggatcgcttgaggtcaggagttcgagaccagcctggccaatatggtgaaaccctgtctctactaaaagtgcaaaaattacccgggcgtggtggtgagtgcctgtaatcccagctatccagaggctgaggcacaagaattatttgaacctgggaggtggagtttgcagtgagctgagattacgccactgcactccagcctaggcaaaagagcaagagtctgtctcaaaaaaaaaaaaa

SEQ ID NO: 1567 - DNA, 99 bp, Homo sapiens
  source 1..99: mol_type = other DNA
aacacacactacctacctcacagggttgttgtgagaaaaactgtcagattttgaaaaatgccttgagctcctcgaaggaaaggcgctatataaatgcaa

SEQ ID NO: 1568 - DNA, 70 bp, Homo sapiens
  source 1..70: mol_type = other DNA
cagaacgccacagtggttgagcatgggctctggtgaaggatggcgggggttcaaatcccagttctccacc

SEQ ID NO: 1569 - DNA, 78 bp, Homo sapiens
  source 1..78: mol_type = other DNA
cagtgatggttgccaggacgaattgagataatatctgtgaggtgctgatgagtgattgacacacagcactctctaaat

SEQ ID NO: 1570 - DNA, 114 bp, Homo sapiens
  source 1..114: mol_type = other DNA
ctgacacccatgtgtttacctgatcgtttatggaggatcctcttcgccccgggacgtgagccctaggaccaagaactgtgtctgttttgctccttgcggtgcaccggcgcctgg

SEQ ID NO: 1571 - DNA, 184 bp, Homo sapiens
  source 1..184: mol_type = other DNA
gaatcagacagacctggctttgagtcctggctccaccacttactagctgtttgaccttggctgagtcacttaacctctctgagcctcagtgtcttcatctgtaaaatggggataataacaattataccactgtcaaagttattctgataattaagtaaataatggatcaacaaagctgtttgca

SEQ ID NO: 1572 - DNA, 317 bp, Homo sapiens
  source 1..317: mol_type = other DNA
cacctgctcttccattgaccaaaaatagttttcccatctctggctaacttctgttccatctgtcaagtttcagcttggaaatcacttcctctaggaagccttccctgcctattcctgcccttgtctggattaggcatccctccactgtggtcccagtctttgctatctgtacactgtgtagtaaactgccctgtttccttgtctaggttgtaaactccatgaagccaggaacttaactgacttagacagtcttgaatcctcagcactagcatagtgcctggtacatgataggtacttaatcatttgttgagtgaatg

SEQ ID NO: 1573 - DNA, 87 bp, Homo sapiens
  source 1..87: mol_type = other DNA
tgcctaactccctcttgtgattccccattgccctcagaataaaaagtcttaaactccctactatgtcctacaaagccttgtgatgat

SEQ ID NO: 1574 - DNA, 112 bp, Homo sapiens
  source 1..112: mol_type = other DNA
aggcggtataacttaagcaagagggagaaaatgggctttgaaacagacttggacctagctttgtcactgcctcatttggtgcccttggacacatcatttaataacctctctg

SEQ ID NO: 1575 - DNA, 169 bp, Homo sapiens
  source 1..169: mol_type = other DNA
gccgggtgccatggctcacgcctgtaatcccaacactgggaggctgaggcgggaggatggtttgcgcccagcctgggcaacactgtgagccgtgatcacgccactgcattccagcctgggttacagcgggagaccctgtctcaaaaaaaaaaaaaaagaaaaaaaaaaa

SEQ ID NO: 1576 - DNA, 983 bp, Homo sapiens
  source 1..983: mol_type = other DNA
caccaaaagcctaagcaacaaaagaaaaaaaaacagataaactagagtacataaaaattaaaaacttttgtgctgtaaacaataccatctagagagtgaaaggacaacccacagaatgggagaaaatatttgcaaatcatagatctgataaggggcttgtatctaggatatacaaagaactcttataactcaataacaaaaagcctgatttgaaagtgaacaaaggatctgaatagacatttctccaaagaagatctataaatggccaataagcacatgaaaagatgcttgacatgattggccatcaggaaaatgcaaatcaaaatcaatgtgatgtcacttcacatccaccaggatgaccagaataaaaaagaatggaaagtaacaagtgttgacgaggatgtagacaaattagaaccttcatatactgctagtgggaaaatggtgcagccactgttgaaaacagtctggcagttcttgaaaaagttaaaacataaagttaccatatgacccagcaattctaccattagatatatacccaagggaaatgaaagcacacagtccatacaaaaccacgtacacaaatgttcacatagcagcattatgcaaaattgccaggaagtggaaataacacgaatgtccagcaactgagaaaaggataaatgaaatgtggtatatctatgcaatggagtattactcagccatagaaaggaatgaagtactgatatatactataacatgaaacttaaaaatattatggtaagtcaaagacagtagtcacaaaaatcacaagttgcatgattccatttatatgagacatccagaatggacaaattgatagggaaagaaagattagcagttgcttagggctgggggaagagggaaatgcgaagcgaatgctagtaagtatggggtttcttttaggggggatgaaaatgttctaaaattagattgtggtgatggttgcacagccttgaaaatat

SEQ ID NO: 1577 - DNA, 1317 bp, Homo sapiens
  source 1..1317: mol_type = other DNA
tttccacggtctccctctgaggcccagcctaggctggactgtactgccgccatctcggctcactgcaacctccctgcctgattctcccgcctcagcctgccgagtgcctgggattgcaggcgtgcgccgccacgcctgactggtttttgtattttttggtggagacggggtttcgcggtgttggccgggctggtatccagctcctgaccgcgagtgatctgcccgcctgggcctcccgaggtgccgggattgcagacggagtctcgcttactcagtgctcaatgttgcccaggctggagtgcagtggcgtgatctcggcttgctacaacatccatctcccagccgcctgccttggcctcccaaagtgccgagattgcagcctctgccctgccgccacccagtctgggaagtgaggagcgtctctgcctggctgcccgtctctgggatgtgaggagaccctctgcctggccgcccagtctgggaagtgaggagcgcctcttcctggccgccatcccatctaggaagtgaggagcgtctctggccggctgcccatcgcctgagatgtgaggagtgcctcggccaggccgtgaacctgtctgggatctgaggagtgtctctgcctgaccgccaccccgtctgggaggtgaggagcgtctctgcccggccgccccattggggaagtggggggcagcccccgcccggctgccgccccgtccgggaggtggggggcgcctctgcccagccgccccgtctgggaagtgaggagcccctctgcccggccgccaccccgtctgggaggtgtacccaacagctcatcgagaacgggccatgatgacgatggcggttttgtcgagtagaaaagggggaaatgtggggaaaagaaagagagatcagattgttactgtgtctgtgtagaaagaagtagacatgggagactccattttgctctgtactaagaaaaattcttctgccttgggttgctgtgaatctataaacttaccctcaaccccgtgctctctgaaacatgtgctgtgtccactcagggttaaatggattaagggcggtgcaagatgtgctttgttaaacagatgcttgaaggcagcatgctccttaagagtcatcaccactccctaatctcaagtacccagggacacaaacactgcggaaggctgcagggtcctctgcctaggaaaaccagagacccttgttcacatgtttatctgctgaccttccctccactattgtcctatgaccctgccaaatccccctctccgagaaacacccaagaatgatcaataaatactaaaaaaaaaaaaa

SEQ ID NO: 1578 - DNA, 297 bp, Homo sapiens
  source 1..297: mol_type = other DNA
ggccgggctcggtggctcatgcctgtaatcctagcactttgggaggccgaagcaggtggatcatctgaggtcgggagattgagactagcctgaccgacatggagaaaccctgtgtccactaaaaatacaaaattagccgggtgtggtggcacatgcctgtaatcccagctactcgggaggctgaggcaggagaatcacttgaacccaggaggtggaggttgtggtgagccaagatcgcgccgttgcactccagcctgggcaacaagagtgaaactccatctcaaaaaaaaaaaaaaa

SEQ ID NO: 1579 - DNA, 159 bp, Homo sapiens
  source 1..159: mol_type = other DNA
gctgggcttggtggctcacatctgtaataccagcgctttgggaggctgaggcaggaggattgcttgaggccaggagtttaagttacagaactatgatcacactgccgcactgaagcctggatgacagagtgagaccttatctcaaaaaaaaaaaaaaaa

SEQ ID NO: 1580 - DNA, 296 bp, Homo sapiens
  source 1..296: mol_type = other DNA
ggctgggcgcagtggctcacgcctgtaatcccagcactttgggaggctgaggcaggtggatcacaatgtcaggagtttgagactagcctggccaatatggtgaaaccctgtctctactaaaaatacaaaaattagccgggtgtggtggtgggcacctgtagtcccagctaaactcgggaggctgaggcaaaggagaattgcttgaacctaggaggctgagattgcagtgagccgaaatcacgccactacactccagcctgggcaacagagggagactccatctcaaaaaaaaaaaa

SEQ ID NO: 1581 - DNA, 1050 bp, Homo sapiens
  source 1..1050: mol_type = other DNA
gaatagagccttttctcggtacccatagcagattcatttttgagcaaagttatgccctattctgcagataaccttttttttttttttttgaaaaacaatttcttgcttactagtgcatgttggtagaggccaaatacctgaccacaggatactatgtgatcatgcaacctgagccactcatcatgaactgaacatgcaacagaaatcccccatcaagtgaaagcaatatttgaaatcaggctccagcaagactggaaaagttgcaggaatatatggcttagattcctatggcgcatactcctgctgtactgctacctcttcatcaacccttaactaaggtcctgtggccatctaatataggaagaaaaacctctagcttggtttacaaatgacttagcatgatatgctgataccttctcaaagtcaactattacaatattatagccccacacaggagtgaccaaaaacacaggggaagagaaatcttctaagcaggcagaacttagagcaatgtatctgattggccatttgcttggtcagagagatagccagaaatacagatctatactgattcacgggcagtggctgatggtttagctgaatagtcaaagcttggaaaaaatatgggaaagttgcttaaagtatagagaaaaattatgtgacttaacctctcagaatggatagagtgtgaagaccgtgtctcatatgactgtttccccaagacaatcccctgtggcggagactctcaatggtcaggaagataaggtaacccaatccatgaatgtcagttgccctctttcccttggtggcagggatgaaggctacacacttcctttcaccatagcaaatctggttatgacccttgctgagtactcaacctgccaatggcagaggccactgctgaacccctaatatggcaccgaatttctagagggattatacagctgtctagtatcaagttgactttaaaaagcagcagcaagtttcctttactagattataaatgtatttttggatatagatttgccttccctgcccacaatgttctac

SEQ ID NO: 1582 - DNA, 293 bp, Homo sapiens
  source 1..293: mol_type = other DNA
ggccaggtgcggtggctcacgcctgtaatcccaacactttgggaggccgaggcaggcggatcatctgagatcgagagttcgagaccagcttgaccaacatggagaaaccccgtctctactaaaagtacaaaattagccaggcatggtggcacatgcccgtaatcccagctactcgggaggctgaggcaggagagtagcttgagcccaggaggcggaggttgtggtgagccgagatcgcgccattgcacagcctgggcaacgagcgaaactccatctcaaaaaaataaataaaa

SEQ ID NO: 1583 - DNA, 152 bp, Homo sapiens
  source 1..152: mol_type = other DNA
cgggctgggaggcaggaggctgtgctccagtcatgccactgcccgcaggaacttagattagcctttttccttctcaaggcctcagtttccccatctgtcacatgagaagggtggacttgattctttgcaattccttctaccattaaggttct

SEQ ID NO: 1584 - DNA, 60 bp, Homo sapiens
  source 1..60: mol_type = other DNA
actctgggcctctgaccagctgtgcggcatgggctaagtcactctgcccttcggagcctc

SEQ ID NO: 1585 - DNA, 192 bp, Homo sapiens
  source 1..192: mol_type = other DNA
atctacccatgaggaataaaaccatgcagcagcatgcaaatggtgtcctggtgttcgcagcagaactgctcatggtaatggataagttgttttcatacagtgggttgtcaatatgtttaataattgttggtatctattaataagggcaatatattcatatggtggattatttggctattaaaatggaatgaa

SEQ ID NO: 1586 - DNA, 103 bp, Homo sapiens
  source 1..103: mol_type = other DNA
agtctagcctgggagccaggatactggggtccttttcccactcttccactgacttgctgtgtgaccttaggaagtctctgcccctctctcagcctcagtgtcc

SEQ ID NO: 1587 - DNA, 138 bp, Homo sapiens
  source 1..138: mol_type = other DNA
aagccgggacttcccctcaagaacctgggcctggggccgggactctgcatgactgggagcaagtcacttaaacctcctgtgcctcgatttcccccttctacaaagtggggccaatgattcttgtgtgtcagcactgtt

SEQ ID NO: 1588 - DNA, 193 bp, Homo sapiens
  source 1..193: mol_type = other DNA
gagttagcagactacccaaatctggcccactgccaataaagtctcattggaacacagccatgctcatttgtttacatgttgtttatggcgactgccatgctgcaagagcagaattgagtagttgtgatagagacctatggcctgcaaagcctaattaatatgtagccctttcagaaaaggtttgcctgcccct

SEQ ID NO: 1589 - DNA, 3957 bp, Homo sapiens
  source 1..3957: mol_type = other DNA
gctggattaaaaagcaaaacccaatggtatgctgtcttcaagagacacatctaacacgtaataacacccataggctcaaaataaaaggatggaggaaaatctaccaagcaaatggaaaacagaaaaaaataggggtcacaatcttaatttcagacaaaataaatgttaatcaaagaaagatgttacataatggtaaagggtttaattcaacatgaagacctaactatcctaaatgtatatgcattcagcacaggagcactcagattcataaagcaagttcttagagacttacaaagagacatagactctcacacaataatagtggtagacttcaatactccactgagagtattaaaacgatcattgaggcagaatattaacaaagataattcagatctgaactcaacactggtccaaatggatctgataaaactctacagaattttccaccccaaaacaacagaatatgcattcttctaatcactacatagcatatactctaaaattgaccacatgatagaacatataacaatcctcagcaaatgcaaaagaactgaaatcatacaaaacacactctcagaatacagcacaatataaatagaagtaaagactataaaattgctcaaagccacaaaattctttggcaattaaacaacatgctcctgaatgagttttgagtaaataatgaaattaaagcagaatcaaaaagttctttgaaatgaatgagaacaaaacaaagtaccagaatccctaggacacagcataggtagtgttcaaagggaaatttgtataactaaatgcccacataaaaaaagaaaggtctcaaattaacaacctaacatcacaactgaaaaaattagaaaagcaagagcaagtcaacccaaagccagcagaagacgagaaataaccaaaaatcagtgttgaactgaaggcaatcaagacatgagaaaccattcaaaagaacaatgaatccagaagttggttttttgaaagaattaataagttagatatgctgttagctagaataataatgaagaacagagagaggacccaaataaacacaattagaaattacaaaatgtatactaccactgaccccacgtaaataaaaataacaatcagaaactactatgtacatatctctgcacagaaactagaaaacctaaaaatgatggataagattctggaaacacacaccctcctaagactgaaccagaaagaaactgtttccctgaacagaccaataataagctccaaaattgaatcagtagtaaatagcataccaaccaaaaaaagcccaagactttttggatggatggagtcacagccaaattctaccagatttacaaagaggagctgatagtattcctactgaaattattacaaaaaattgaggagaatcgtctcttctccaacttattctttgaggccagtattctatgaagccagtatcatctggataccaaaatcttgcagacacaataaaaaatgaaaacttcaagccaatatccttgatgaacatccatgcaaaaattcacaaaatatgtgcaagctgaatccagcagcacatcaaaaatctaatccaccacaatcaatcaattcgtccccaggatgcaaggttggttcaacatttgcaagtcaataaacatgattcattgcataaacataagtaaagacaaaaatcacatgattatctcaacagatgcataaaagcctttcattaaaatataaataccattatgctaaaaatatacacaagctaggtattgaagaagcatacctaatataataagaaccatctatgtcaaacatcatactgaatgggcaaaagctggaagcattccccttgaaaactggcacaagacaggtataccctctcttaccacttttattccacttagtattggaagtcctgacaagagcaatcaggcaagataaataaataaagggcatccaaataagaggaaaggaagtcagactacttctgttacagatgacatgtttctatatctagaaaatctcttcatcttggcccaaaagctccttcagctgataaacaacttcagctgtttcagcatacaaaatcagtgtacaaaaatcactagcatttctatatgccaatgacagccaagcagagagctacatcagaaaggcaatcccattcacaactcccacaaaaagaagaaaatagccaggaatacaactagccagggaggtgaaaggtctctgcaatgagaattgcaaaacactgctcaaagaaatcagaatagacacaaacaaatggaaaaacatcccatgctcatggatagaaggaatcaatgtaattaaaatggccattctgtctgaagcaacctacaaattcagtgctattcctatcaaactaccaatgacattcttcagaggacaggaaaaaaactactttaaaatttatatgtagccaaaaaagagcccaactagccaaaggaatcctgagcaaaaagaacaaagctggaggtatcattttacccaacttcaaactatagtacagggctacagtaacaacaatagcataatactggcacaaaaacaggcacatagaccaatggaacagaatagagagcccagaaataaggccacatacctacaaccatctgatctttgacaaagctaacaaaaacaagcaatggggaaagactccctattcaataaatggtgccgaggttactgtctagccatatgcagaagatttaagctggatccctttcttacacaatgtacaaaaatcaactcaagttgaattaagacttatatataaaaccaaagactataaaaaccctggaagacaacctaggaaataccattctagacatagcaggaaagatttcatgacaaggacaccaaaagcaatcacaacaaaagcaaagattgacaaatggaatctaattaaatgtaagagcatcagcatagcaaaataaactatcaacagagtaaacagcctacagaatggtataaaatacttgcaaactatgcatctggcaaaggtctaatatctagcgtctataacgaacttaaacaagtttataagagaaactcaaacaagtgtattaaaaagtgggcacaggacatgaacagatacttttcaaaagaagacatacatgcagccagcaagcatatgaaaataaaactcaatatcactgattattagagaaacaaatcaaaacaacaatgagataccatctcacaccagtcagaatgactatcatttaaaagtcaaaagaacaaaacaaacaaacaacaacaaaaaaaaaaccagatgctggtgaggttgcagagaaaagagaacacttatacactgttggcaggagtgtaaattagttcaaccattgtggaaagcagtatgatgattcctaaaagaactaaaagtagaactatcattcaacccagcaatcacattactgggtatataccccgaggaatataaataattctgccataaagacacatgcatacggatgttcattgcaatgctatttacaataacaaagacatgaaatcaacctaaatgcctatcaatgacagattaaatagagaaaatatgatacatatacatcatggaatactatgcagccataaaaaagaaggagcttaagtcttttgtgggaacatagttggagctagaggctgttatccttagtaaactgatgcaggaatagaaagtcaaatattacatgttctcgcttataaatgaaagctaaatgatgagaactcatgaacacaaagaagggaacagcagacaatgggatctgcttgaggagggagggtaggaggaaggagaggagtagaaaagataactattgggtactaggcttaatacttggatgatgaaataatctgtaaaacaaacccccatgacacaagttcacctatgtaaaaaaccttcacatgtacccccgaacctaaaatagaagttaaaaaaaa

SEQ ID NO: 1590 - DNA, 578 bp, Homo sapiens
  source 1..578: mol_type = other DNA
gtaaaaagtaaagtagagattcctcttcaaagagactttactccccatataattaggaatagtaacttctcttagaagcaaaatttattcaagaacctgtgctaacatgcttagatatctgctagccataataaagaaatcaactgttcttagctcccacagtttagcctaaatatttgccctggcatgcttatacttgtcaaagcaagcatgaggtcatagcctgttcctcttccttatatgaaggtgtttttacctttctcagcattccacaagttagttcctccttcctttgttctcctctgcctttgcctcttttaaaaagttctaagtcgctagccaatcagcacaaatacagaatgtgaggtcccgttccagccaatggaaaccggacacagcagtaaggtggatgcgtcaggttataaatgaccctgtctcctttgttcggtgtactctcacggcaaaaccgctggtgagtgtaccctttctgcagaaagtaaaaatggccttgctgaggaaattaaatgtacgtccaagtgctgcttctttatggcaccagagaacaagcatttctaaca

SEQ ID NO: 1591 - DNA, 225 bp, Homo sapiens
  source 1..225: mol_type = other DNA
actggattaagaaccaaaagatccatgttcaagtcctagttctgccttgttagttgtgaattttggggcaaaacacttaaacattgagtaaacatttcttatgtgaaactgaaataatggctatcctaagtacctcatgaagaggaggcaggatttaaagagatgatggatttgaaataattttatgaactataagaagttttaatgtagacaatgatttttatt

SEQ ID NO: 1592 - DNA, 181 bp, Homo sapiens
  source 1..181: mol_type = other DNA
cctgctgtcttccccaccgcagtcaccaccacccgaaatgccacgtggtcactgtgcactgccctgttcatgtgcctctgcggggcagggccttcctggttttgttcactgctgtacccagatgcctacaaccatccctgccacatacaggtgctcaataaacacttgtagagcagatgga

SEQ ID NO: 1593 - DNA, 308 bp, Homo sapiens
  source 1..308: mol_type = other DNA
ggccgggcaaaggggctcacccctataatcccaggactttgggaggccaaggcaggaggatcacttgagtccagaaattcaagacccgcctgggcatcataatgagaccccatctctacaacaaaatttaataaattagctgggcacagtgttcacacctgtagtcccggccactcggggctgaggcaggaggatcactggaacctgggaggttgccactgcagtgaactgtgtttgcaccactgcactccagcctgggcaacagagtaagactctgtctcaacacaactatgaaaaagaagagagaa

SEQ ID NO: 1594 - DNA, 668 bp, Homo sapiens
  source 1..668: mol_type = other DNA
atctattacttttcaataacctccttgtgatggccttacttcacaatgacccttaactctcaattgaactatagttacagcctcataaccagtatccctttccagtttctttctgttccactttatcttctacattgctgctggagtgcttttgaaaagtgtacaggtaatcacgctttgcccctcttaggatctctgttggctctctattgcccaaaggatacaggaaaaatcccctggactcacagacaatgctttacacaatcttttcctccaaattccaaacttatcctcaaatttttcccttgatgaaatttgtactccagccatatagtcttccttgacattccctggacacccatattcttttatgtctctgtccagtgcaccttggtttctgttcctaaaatgatattttctactttcaagcatgcagaatcagtatttatccttcagataaagtgaaatacctttttttttttgagaagccgagccccactcttctgtaaggaattattcttttccttatgatcctatgggattttcacatagaataagagaaacacttctcacagtacattgtaattacttgttccaatgagtctcttcttccatagtctgtgaatttagcaagggctgagttctttctcattctactttgtgttacc

SEQ ID NO: 1595 - DNA, 5777 bp, Homo sapiens
  source 1..5777: mol_type = other DNA
aacagacatacagacagacttctgtttggggaaagtgagaagtgagggaagagaatcagagactgctgcccagtaatccagggaattccccagatcttacccaagcctaccaaggtggtacctctaggagtctgcaagaattacagcattactagttctgcggtatctcccagtgttgatatggcttcagtgaccagagacttcgatcaccacacccaattccatttgaatacctggaaacccttctcaagaaggataggtacaaacaagctgagactgcaagcttaaaataaatacctaacttctaaatacccagatattaacaaacatccacaagcatcaagaacatccaggaaaacatgatctactaaacaaactaaataagtcaccagtgacaaattctagagtggtggaaatagatgaactttcagaaacagaattaaaaatagttgtttgagaaagttcagtgagcatcaagataacacagagaagggattcaaaatcttatcccagaaatttaacaagcagattgaaataattttttaaataatcaagcagaagttctgcagctgaaaaatttctattgtcaaaatgaaaaatgctttcgaatctctgaagagtagaattgatcaagcagaaggaaaagttggtgagattgaagacaggctgtataaaaaacagccatgggggaaagaagaaaaaaataataaagagaatgaagcaaacctatgagatctagaaaacagtctcaaaagggaaaatgtaaaatgtattgaccttaaggaggaaataaagaaagagatcaggtaagaaagtttatttaaagaaataataacagagacatttccaaacctagaaaaaatattatcgggtagacgaaggtcatagaaaattaagcagatttaatccacataagactacttcaacacatttaataatcaaattcccaaaggctaaggataaagaaaggatcctaaatgaagcaagagaaaagaaacaagcaacattgcaagggagcatacatctggcaacaaccttttcagtggaaatctgacagtccaagatagaggtgcatgacatatttaaagtgctgaaggaaaaaaaaaatgaaacaacttttatcctagaatagcatatccagggaaaatagccttcaaacatgaaggaaaaataaaactttacaagtcaaataacagctgagggatttcatcaacagtggacttgtcctaagagcaatgctaaagagagttctttaatctaaaagaaaaggacattaacaaacaataagaaatctgaaggtacaaaactcactggtaacagcaaatacacagccaaatacagaatactgcaacactgtaattgtggtgtgtaaaccactcatatcttgaataggaatagtaaaagaactaatcaaaaataataactacaacatatttctaagaaatagatagtataaaaatatatagaaacaactaaaagtcaaagaacatggaggataaagtgtagagtttttttttaagttttctctttgcttgtgcattgtttctgaaatcagttaggttgtcattagtttaaaattattttttacaagatattatttgcaagcttcatggtaacctcggatcaaaaaacccacaacagatacacagaaaagtaaaagcaagaaattagaacatactaccagagaaaatcacttttacacaaaggaagacaggaaggaaggagggaagagaagaccacaaagtaaccagaaaacaaataacaaaatgggaggagtaagttcttacctatcaataataacgtttactataaatggactaaactttccaatgaaaaacataaagtggctaaactgataaaaaaaaaaaaaaaagacccaattatatgctgcctacaaaactcacttcacctatagagtgaaattaaagggatggaaaaagatattctgtacaaatgtaaactaagaaagagcaggaattagctatacctatatcagatagaataaattctaagataggaactaaaggaagagacaaagaaggacattatataatgataaaggagtccatttggcaagaggatataacaattataaatgtatatgcacccaacactagagcacccatatatataaaacaaatattattaaggctaaagagaaagaaagaccacaatacaatactagctggagagctcaacaacccatttttagcattgaacagatcatccagacagaaaatcaacaaagaaacatcagacttaatctacactgtcaaccaaatgggcctaatagatattatagaacattttatccaaaagctgcagaatgcacattctttctttcagcacatgggtcattctcaatgatagaccatatgttaaagtacaaaatgagtcttaaaacattcaaaacattgaaattatattaaatatcttttctgaccactatggaatagaactaaaaatcaataagaagaggaactttggaaactatacaaacacatggaaattaaacaatatgctcctgagtgacaagcaggtcaatgaagaaatcaggaaggaaattttaagattttatgaaacaaatgaaaatggaaacacaacatacataaacttatgggatatagcaaaagcaattgtaagatggaagtataccaataagcacctgcattaaaaagtagagaaatttcaaataaataacctaatgatacattgtaaggaactagaaaagcaaaagcaaaacaagcaaaaattagtaaatcaacaaacttttagccagactgagaacaaaagagagaagacaccgcaatataaaatcagatgaaaaacgtgacattacaactgatatcacagaaattcaaaggatcattagagatactatcaacaactatatgccaaagaattggaaaatctagaataaataaatttctagacacatacaacctaccaagattcaaccatgaaaaaaatctgaaaccaaaatagaccaataacaagtaatgagacagaagtcataattaagtctcccatcacagaaaaattcaagacctaatgactttactgatgaattctaccaaatatttaaagaactaataccaatcctactcaaactacttgaaaaaatctaggaggaaggagcacttccaaactcatttcatgaggctagtattaccacgatgccaaaaccggagaaagacacatcaaaaaagaaaactataggcaaatatctctgatgaacatagatgcaaaaatcctcaacaaaatactcacaaaccaaattcaataacaaattaaaaggattattcatcaagaccaagtgagattcgtccagggatgcacagatgtctcaacatacagaaatcaatcaatgtaatatatcatattgaccgaatgaaggataaaaccatatttcatttgatgctgaaaagcattcaataaaattcaacatctcttcgtgacaaaaatgctaaaaaatgtggcatagagggaacatacctcaacacaattaaaagctatgtatgctagactcctacacagtaccagactgaaggggaaaaattaaaagccttttctctaagatatataacaagacaaggatgcccatttttaccactgctattcaatatagcactggaagtcctagctagagtaattaaatgagagaaataataaagggcatccaaattggaatgaaagaagtcaaattattcttgttcatagctgatatgatcttctatttagaaaaacctaaaaattccaccaaaaaactatactaatagaactgaagaataaattcaatacaattgcaggatacaaaatcaacatacaaaaagtattagcatttctaaatgtcaacaatgaacaacctgaaaaagaaaccaagaaaaaaactcccatttacaataactacaaataaaataatatgcctaggaataaattttaatcacagaagtaaatgatctcttcaatgaaaacgataaaacattagtaaaagaaattgaagagggcacaaaaaatggaaagatattttgtgttaatagattggagaaatcaatattgttaaagtgttcatactgctgaaagcaatctacacgttcagtgaaatccctatcaaaataccaatgacattcttcacagaaataacaaagtaatcctaaaatttgtatggaaccagtatagacccaggatagccaaagccatcatgggcaacaaaaagaacaaagctggaggaattgcattacctgactttaaattatactacagagctatagtatccaaaccagtatggtattggaataaaaacagacacatagatcaatggaacagaatagagaatgcaaaaataaatccatacatctaccatgaactcaattttgacaaaggtgtgaagaacatattttgggaaaaggacagtctctttaataaattgtgccaggaaaactggatatccatgtgcagaaaaatgaaactacaaccctatatctcaccatatacaaaaataaaataaaaatggattaaagatttaaatataagacctgaaactatgaaactactgaaagaaaactctgaagaaactctctaggacattggtctgggcaaaaatttcttgagtaatacctcagaagtgcaggcaaccaaagcataaatagaaaaatgacattacatcaagctaaaaagttctccatagcaaaggaaataatcaacaaatgagacaaattatacaatgggaggaaatattttcatgtgataatagattaataaccctaatatatagggagctcaaacaactcaatgggaaaaaaaacaaataatctgattttaaaatggacaaaagatctgaacagagatttctcaaaagaagatgtgtaaatagccaatagatatatgaaaaatactcaacattattaatcatcaagaaatgcaaatcaaaacaacagtggggtatcatctcaccccagttaaaatggcttttatccaaaaggcaggaaataatgagttctggtgaggatgtggagaaagggtaaccctcatacactgtttatgggagtataaattagtacatccactatggagaggagtatggagattcctcaaaaattaaaaatagaaattaccatatgattgagcaatcccattgctaggtatttatccagaagaaaagaaatcagcatattgaagagatacctacactcctgtatttattatttattcacttagccaagatttggaatcaaagtgtccatcaactgatgaatgggtaaagaaaatgtggtacacattggaatattatttagccacaaaaaagaatgaactcctatcatttgcaacaacatggatggaacttgaggtcattatgttaagtgaaagaaacctggcacagaaagacaaatttcacatgttctgtgtcatatgtggctaaacattaaaacagttgaactcatggagagaaaagagtataatgatggctacctaaggctgggaagagtagtggtgatggaggggaaaagtggggatggttaatttatataaaagtatagttagatggaatgaataagatctagtatttgataacacaacagggtgactatagtcaacaataattattgtatatatcaaaaaactaagactggaattggaatgtgtctaatacaaaaaaaaaaataagttcctgaggtgatggatatcccagttaccctgatgtgatcattaaacattttatgcttgtaccagaacatcacatgtaccctataaatatatataactatcatgtactcata

SEQ ID NO: 1596 - DNA, 753 bp, Homo sapiens
  source 1..753: mol_type = other DNA
tctgttccttgattgcctatccagtaataatttcttcctccacagcatcttagccacccactcttatgttttatgctatatcttactattgttcataggctctaacatctcactttaaaacgtcccactctctgaccaccacttaccacttcctcttattgacccagttcatttctatagttcccatatcaatcattgatcccacaactactactaaatcattggctctacacattttcatgcctgttagctaccgtaagtcttcatgtcctacctcaccaaacttagaatacatggttcattactgtgattactcaatttgcatgcatcttcaatttctttgtttttctcttcattggggggcaaaaatcagcctcttcatcaacctgtgtatgtctcctctatgcctacatcaaggcagacaaatatagctggagaaatactgttaactgttttcactttaaatttatgaccaaatgcctattacacttcctcagacagtccacttgttctcccagggaacattttcgtacattctttctcctcaaatgcaatatacctcaccttcttcaacattagctgctgacctttcttcttattttattgagacaataaaaacaaacaaaagagaactttctcattgtctcacgactcaatctaccaacttacctacatctgcatccatatactctgccttcccttttattaaagtgaacaaatggtctctcctcttatctgtcaaatgttccacct

SEQ ID NO: 1597 - DNA, 308 bp, Homo sapiens
  source 1..308: mol_type = other DNA
ggccgggcgcggtggctcacgcctgtaatcccaacactttgggaggccaaggtgggtggatcacgaggtcaagagatcgagaccatcctggccaacatggtgaaaccccgtctctactaaaaatacaaaaaaaatagccgggcatggtggcgggtgcctgtagtgccagctactcgggaggctgaggcaggagaatggtgtgaacccgggaggcggaacttgcagtgagccgagatcacgccactgcactccagcctgggcaacagagtgagactgtctcaaaaaaaaaccaaccaaacaaacaaaaa

SEQ ID NO: 1598 - DNA, 296 bp, Homo sapiens
  source 1..296: mol_type = other DNA
cccagtgcggtggctcacacctataatcccagcactttgggaggctgaggcaggcagatcacgaggtcaggagttcgagaccagcctgactgacatggtgaaaacccgtctttactaaaaatacaaaaacagccgggcgtggtggcgcgcgcctgtaatcccagccactcaggaggctgaggcaagagaatcgcttgaacctgggaggcagaggttgcagtgagccaagatcgcgccactgcactccagcctgggcaacagagcaagactccatccaaaaaaaaaaaaaaaaaaaa

SEQ ID NO: 1599 - DNA, 65 bp, Homo sapiens
  source 1..65: mol_type = other DNA
tgcttgcttctgaagacaactccaaggactcacttccatagcaaagctcacagtgtcactataac

SEQ ID NO: 1600 - DNA, 297 bp, Homo sapiens
  source 1..297: mol_type = other DNA
gctgggcacagtggctcatgcctgtaatcccagcactttgggaggtggaagtgggcatatagcctgaggtcaggagttcaagaccagcccggccaacatggtgaaaccccgtctctactaaaaacacaaaaattagctgggcacggtggcacacacctgtaatcccagctactcaggaggctgggccaggagaatcgcttgaacccaggaggcggagtttgcagtgagccgagatcacaccacgcactccactccagcctgggcaacagcaagactccgtctcaaaaaaaaaaaaaa

SEQ ID NO: 1601 - DNA, 309 bp, Homo sapiens
  source 1..309: mol_type = other DNA
gccaggcgcggtggctcacgcctgtaatcccagcactttgggaggccaaggcgggcagatcacgaggtcaggagatcgagaccatcctggctaacacggtgaaaccccgtctctactaaaaatacaaaaaaattagctgggcatggtggcgggcgcctgtagtcccagctactcaggaggctgagacaggagaatggcgtgaacccaggaggtggagcttgcagtgagtggagatcgcgccactgcactccagcctgggcggcagagctagactccgtctcaaaacagaaaaaaaaaaaaaaaaaaaaa

SEQ ID NO: 1602 - DNA, 136 bp, Homo sapiens
  source 1..136: mol_type = other DNA
gccaggcacaatggctcatgcctataatcccagcactttgggaggctgaggcaggaagcacactggagcccaggagtttgagaccagcttgggcaacatagcaagaccctgtctatttttttaaaaaagtaaaaaa

SEQ ID NO: 1603 - DNA, 247 bp, Homo sapiens
  source 1..247: mol_type = other DNA
tgtcacaccctctgtaaaggcttccctaatttccatggtttcgtggtttttcttcctctgttccaaggaacatgttattagtacctttactgcagcacttacttgtccttcatgtgttacgattgtaccatgtgttctctccactaggttttgaactcctcaaagatgaaatccatgcattgttcatctctgcaaccttgatgtccaaatacgtgtttgacagatgaacgaatgactgaataaatga

SEQ ID NO: 1604 - DNA, 151 bp, Homo sapiens
  source 1..151: mol_type = other DNA
ccttgagagagtaaatctttcattctcaatttcttcattcagaaggtggagataagtaatacctactcctaaatttttatcctgatagtgagaaaatatataagcattttggaactacagaacaccatacaaaattagcattattagtact

SEQ ID NO: 1605 - DNA, 768 bp, Homo sapiens
  source 1..768: mol_type = other DNA
agttgacccttgaacaacatgagtccgaactctgtgtgggtctacttacaggcagattttttttttcaataagtatcttggaaaattttttggagatttttggcaatttgaaaaaacttgcaaactatagcttagaaatatcagaagttaagaaaaagttggtatgtcatagatgcataaaattgactatgtcaatactagtgcattttatcatttactaccataaaatatacacaagttttttttaattataatttatcaaaacaatttgcacacagactacgtgacgccattcacagtccagagaaatgtaaacagagataaagatgcagtatgaaatcataactgtataaaattaactgtagtacatactgtacgactgataattttgtagccaccttctgttgccattgtgatgagctcaagggttgggagtattcacttaaaatgccacgtgacgctaatcatcttcaaatgagcagttcatctctccagtcaattgtgtatcacagtaaaaagtgttctctagcagttccatattttccatcatgtttagcacaatacagtaaataatttgaataatatcatgggacccatatcaagtgctactaatgatggtggaagtgctcccaagaagcagacaaaagtcatgacatgacaagaaaaagttgcattgcttgatatgtaccatagattgaggtctgcagctgcggttgtccaccatttcaaaataaatgaatccagctgaaggcctattgtaaaaaaaaa

SEQ ID NO: 1606 - DNA, 87 bp, Homo sapiens
  source 1..87: mol_type = other DNA
acattttttttagttcctgtggtgaagacatggaagccagtgattatgagcttgaagatgaaacaagacctgctaaggtaaatagct

SEQ ID NO: 1607 - DNA, 503 bp, Homo sapiens
  source 1..503: mol_type = other DNA
aaatatgacaatgtaatgagaccgacctcaaactacatgttagaggtatatattgaactgacagctatccccaccaaagaaatcaccttatgaggctgattattccaatatttccaccacagcacagaatattcctggagtctttctataaaccacacactataaaaaatctaaaaatatgaaaataatcacacttcattttttatcccaaacagtgactttaacacccacttcattcacttgtctcggttataaggacctgttagcagcttgcagaaatgaaatccaacttaagaagatgagaattaactaccattaaaaatcttcaaaaaatgtgctgcgaattctgaaggtaattacaaaaattcaatgccaaaaattttttgagcaatgggaatcttaccggactatgtttccagctttccaagaggattacttttttcctatagattgtggaagagaggatacagctcatttaattgtacaaattctggtatgtttat

SEQ ID NO: 1608 - DNA, 191 bp, Homo sapiens
  source 1..191: mol_type = other DNA
gcactggacggggaatcaagagacccggtttctaatccctgctctgtcactaacaagctgcgtgatcttcggtaagtcatttaaactctatgtccttggctttgatatttacacataaaaatagatatcttccttctaggatcattgtcaggatttaaaaatcaatgtgaaaatgcactaaaaacttaaag

SEQ ID NO: 1609 - DNA, 343 bp, Homo sapiens
  source 1..343: mol_type = other DNA
cagtagaccccaacccctaggccgccagatcagtaccagtccacggcctattaggaaccgggctgcagagcaggaggtgagcggtaggcgagcaagcattactgcctaagctccgcctcctctcagataggtggcagcaatagattctcaaaggagcctgaaccctactgtgaactgcacatgcaagggacctaggttgtgtgctccttatgagaatctaactaatgcctgatgatctgaggtagaagagtttcaccctgaaaccaagcctcccatcccccatctgtggaaaaactgtcttccacgaatccggtccctggtgccaaaaaggttggggactgct

SEQ ID NO: 1610 - DNA, 778 bp, Homo sapiens
  source 1..778: mol_type = other DNA
cttctgcccatgagggaggaacaaagagtgaatctgccctcttgcttttaacaactagaaaactgaacaaaatgtattaaacacattttttcagacattgaacaggcagcaagagcctttgaccccagtaagaaagagaacaagagaaccaggattgccccagaggcacattccaaactacagagcatagagcagaattccaagtagctatctagctgaattgagaagctggagggacaaactggcattcaagaatgcggaggtagatgaaagttctgagatacaatttcaaagtgaatgaagctatgctgaagaaaatgcaaactggtccccttcatgctctgttccctggtcccacacatgcttatgcatagtgtgacactccaccaggtctggcaagaaccaaactagagagctatcagttgaatagtttcaaagttcacacaaggctgcaaatcatttgatatctcatcagccagagtagtgagtcttcactgaccactaagacaatcagcagaaacctgtaagaaccatgccttaatagtggggtaagccacccttagagtaaaagctaatctaaatccactctaaaatcaattatcaaatgaccaaagtaatcataaattactaaacagcctaccagaacaaaacccaatagtcatgaaagacacataacatgcacaaaaaaattcagatactaaacaatgtaacattcacaatattcagcaggcaatcaacaactatcagacatgccaagaagcaagacgatgtgacttat

SEQ ID NO: 1611 - DNA, 233 bp, Homo sapiens
  source 1..233: mol_type = other DNA
atagtatagtttatgagtcaagcttctgaaccaaaagttttactttgagccctattcctaccttacaagctagcaggtgaccttgggcaagccaacctattagaaccctgggttcacgtccatacagtgaagacatcataacctgtcctacctacttcacaagcttcctctaccgatcaactagatcaatatatgtaagattttttttgacaactgtaaagtactataaaatg

SEQ ID NO: 1612 - DNA, 418 bp, Homo sapiens
  source 1..418: mol_type = other DNA
gtgctgggtgctgagctcagctgcccggatgacctttccagactgaaggacatactcccctaacagctgggagtgctgctggctggccatttacttccagcccttatgaggagtttcccctgctgaagagccctgcctgccccagatcatacccccttcctgcctgtaacccttaccggctccatatggggtacaaagggctggcctcctcaccccaacttgggaaaccctctggggccatcccagctccagagccccttgtggggtcagtgagacctcattgtggccacattacagcccagtgcctctccctgacaagcctgtacccagccggctcagcccacagcactgtcctatgaaccttcctgcacgccattctccacctcagtatctgctttcggggaacccaacctgcgac

SEQ ID NO: 1613 - DNA, 182 bp, Homo sapiens
  source 1..182: mol_type = other DNA
aggggctagcaagccacagcctgaggaccaaatacagcccacagcttgtcttggtaaatcaagttgtgctggaacacagccatgaccatggtcattcccacagtagtagtagcaaaagcaaacagcccaaaaagccaaaaatacttcctatctggccttttacaggaaaagtttgctgaccc

SEQ ID NO: 1614 - DNA, 312 bp, Homo sapiens
  source 1..312: mol_type = other DNA
gctgggcacggtggctcatgcctgtaatcccagcaccttgggaggccaaggcaggtggattacccaaggtcaggagttcgagaccagcctggccaacatggtgaaaccccgtctctactaaaaatacaaaaaaattagctggatgtggtggtgggcacctgtaatcccagctactcgggaggctgaggcaggagaatcacttgaacccaggaggcggaggttggagtgagccaagatcgtgccattgcactccggcctgggcaaaaagagcaaaactaaatctcaaaaaaaaaaaaaaaaaaaaagagaaaa

SEQ ID NO: 1615 - DNA, 311 bp, Homo sapiens
  source 1..311: mol_type = other DNA
gccaggtgcggtggctcacacctgtaatcccagcaatttgggaggccaaggcgggcagattatctgaggtcgggagttcgagaccagcctgaccaacatggagaaaccccatctctactagaaatacaaaattagctgggtgtggtagtgcatgcctgtaatcccagctacttgggaggctgaggcaggagaatcgcttgaacccgggaggcagaggttgcagtgagctgagattgtgccactgcactccagcctgggcaataagagcaaaactccatctcaacaaaacaaaacagaaggaaatgagaaaa

SEQ ID NO: 1616 - DNA, 297 bp, Homo sapiens
  source 1..297: mol_type = other DNA
ggccaggcgcagtggcccacgcctgtaatcccagcactttgggaggccgcagagggcggatcatgaggtcaggagttcgagaccagcctggccaacatggtgaaacaccgtctctactaaaaatacaaaaattagcgggtgtgctgacaggtgcctgtaatcccagctactcaggaggctaagacaggagaattacttgaacccaggaggcggaggttgcagtgagcagagattgcgccactgtactccagcctgggtgacagagcaagactctgtctcgggggaaaaaaaaaaaga

SEQ ID NO: 1617 - DNA, 855 bp, Homo sapiens
  source 1..855: mol_type = other DNA
ggttgaaagaatcaacattgtcaaaatgtctataacacccaaagcaatctacagatttaatgtagtccctttcaaaattccaatgacatttttcacaaaaatagaaaaaaaaaatcctaaaatgcatatggaaccgcaaaagcccccaaataactgaagcaattttgagcaggaacaaaactgaaggcatcacatttcctaattttaaattatatttacaaagttatagtaatccaaaaagtatggtactgacataaaaacagacacatagatcaatggaacatagaccaatgggacagaatagagggcccagaaataaatccacgcatatatggtcaactattcttccataaggcacaaagaatacacaatggggaaaggatagtctctttagtaagtggtgctgggaaaactggatattaacaacaaaaaaattggatctttatcatacacaaaaccagctcaaaatgaattacatattaaataagtaattattcatttttattatttattaatttaataataacataattaaatgtgtaagatgtgaaactgtaaaactagaagaaaacagggggaaagctctgtggcattggtcttggcaatgattttttgaatatgacaccaaaagcacagttaacaaaaacaaaaacaaacaagtgggactacatcaaactaaaaagtttctgcactgcaaaggagcaatcaataaaataaaaaagcaacctgtggaatgggagcgattatttacaaaccatatacctgataagaagttaatatccaaaatatataagaaactcatacaactcaatagcaaaaaaacaaataacttgatttaaaaataggcaaaggact

SEQ ID NO: 1618 - DNA, 297 bp, Homo sapiens
  source 1..297: mol_type = other DNA
gccaggtgcagtggctcctgcctgtaattccagtgttttgggaggctgaggcaggcagatcatgaggtcaagagatcaatactagcctggccaacatggtgaaaccccgtctctactaaaaatacaaaaattagctgggcgtggtggcatgcgcctgtagtcccaactacttgggaggctgaggcaggagaatcgcttgaacccgggaggtggaggttgcagtgagctgagatcacaccactgcactccagcctggtgacagagtgagactccgtcttaaaaaaaaaaaaaaaaaaa

SEQ ID NO: 1619 - DNA, 304 bp, Homo sapiens
  source 1..304: mol_type = other DNA
ggccaggcgcagtggctcaggcctgtaatctcagcactttgggacactgcactgggaggaccacttgaggtcaggagttcaagaccagcctggccaacatggtgaaagccctctctactgaaaatataaaaattagccgggtgtggtggcacgcacctgtggccccagttactcaggaggctgaggcaccagaatcgcttgaacttgggaggcagaggttgcagtcagctgagattgggctactgcactccagcctgggtgacaaagcaaaactccgtctcaaaaaaaaaaaaaaaaaaaaaaa

SEQ ID NO: 1620 - DNA, 2284 bp, Homo sapiens
  source 1..2284: mol_type = other DNA
atttcctattaaacatgttagattaagaaacgtttcttttccttcctgaaattactaaaaggacagtaaaagaataaaaatgctataaaaccacaaagacagaggaggagcaaagagggcagcaggtgagagacaacattaggaagataggaatcagatgaagagttgttaactgaatgagcagaatgaaaaaagctgacacctaactgcctatcagaagcaagtctcagaaacccagaaagaggaattaaaggcatcaagtacatctgaaagctgcaatgaggaagattggttgaaagtttaggtaaggagcaattagatccccacaatctttctccagctttagcacccatgtgactgccccctcacaccctagcagaagacaagaataacctctcaagaggctaaatcggagaggttctagattcagaaacatctgtacatgtgaggatgtggctcaagcactgtgtgacaaatagcaagactaagtaaaagtctactgaacaatgagaaccctatcccacttccttttctttgtataatgctgagagacagccttttacccccaggcaaaaaattagataattcatttgtgggggaacttaccagcacaaaagatcagatctgcagatactaacccttgtgagtcctttaatgaaagagctacaaacccacctgattgtcttccatgagtcccacttgctgacaaactctgcccatgtacacagagagttccaagtatgccttgcagtgccccttaaacagggcagccagtaaaggattgctagacatttcataaaggcctctaacataaaagacagatgggaaaaaaaaatagtactcaaggaaagtaccatcagtactttcagaaaactcttatcagtatcctcagataaataagagaaactattgcataatagctattgcataatattcataatataggaacagaatgcaaaagaagatttgaaaaacacaaagagctcttgggaattaaaaaaatacataaatggcagaaataaattatgtagaagagttggaatataaagtagaggaaccctcctgaaaagcaaaccatgaagcaaagagatagacaataggaggtgaatgataaggagagaaaattctcaaataaataatacaagaaaattcccagaactgaaaaacatgagctacctgatggaaagcgcctgctaagtacccagtgcaataaattaaagtaggtgggacccaagtgaaagcatattatcatgaatcccaaatgtttccagagaaaaaataagttacatataaagcactgggaaccagaatgatgtccagtagcaacactaaaatgattcctttgaaattctgagagaaaattattttgaacataaaatacagtcacaatatcaaccacgtgtaagagaagactaaagaaattttcagacaggcaggatctcatggaatttactgcccctctacccctttgtataaagctgaaaggaggtgtggtctatcaaaattaggaaacaaattaagaaagatgatacaggaaagaagaaatctattctgtgacagcatgtggttcatttttctgtaatgtagattgcttttttcctggaggattcaggcaacagaatcccatgaaatactgggcttttgttatagtacatagaccaggatccaagggggtattggagggaaggtacaggatgacagctgtacatcaggcctagacaggcaaccatccagattggcaggaggacaggggacttaaggagggaggtctctaagaaaaaaaaaaaaaaagtggaattgatgagtttgactgtattgaaaggtacttcataaacttagttacacatgtgaggttgaattagtaataggtacctaaaaagttaagaaaaatatgaggcaaagcaaaaagcgtacgtgaggatatctaataatacactctgtggctcagctatgagtaatgaaatttctgttgttataataaagtcaaccctaagtatttcaccagaaattataaccagattagcaggatgggaggaggaagggatttgggaagggatcaaagtgggagggaagtgtaagagaggtcaaatcctcatctgccatagtaggaagtcatttgctaaatgtctaaaatttaatatgaagaaatagcagtataagcatgttatttagaaaaactaaatgccataagaaactactaaagaagataaaaagaatttctagtacagagaaggacctggaggtggggctagggaccattattttattatgaactttatggtac

SEQ ID NO: 1621 - DNA, 396 bp, Homo sapiens
  source 1..396: mol_type = other DNA
ttcttgggaatagcactgattttcctttgggataacacccctctcttgctctgaggtctacattaaatagaattcatcacccacctgagctccgggagagaacatatgacccggaaatggccaatgaaagtgctttattcccctaaccacagtgattggctgaaaggtgagcacatggctcaattttggccaatgagggccaggcctaggactcttcctagtaacgttgggaaagaagagtacttttgtatccctattctcctacccctctcccccaggatcactagctagggaccatgaaatcctgtctgaacatgaagcttacaaaggcaagcagggactagaggtgaaaagaagaccagtaacataccagtttttcagcttctggttccaacc

SEQ ID NO: 1622 - DNA, 428 bp, Homo sapiens
  source 1..428: mol_type = other DNA
gttttattcttaataatcaaaaacttgaaacaactaaatattcatcaacacttaaaaggatctgtaaactgtgatatactcatacagtgaaatactatacagcaatgaaaaagaaataactactgctagagacaacaagatgaatgaatctcacagacattatactgactgagaaaagttacacacaaaagaatacagagtccattatcccatttacatgaagttttaaaagcaggcaaaaacgggctatagtgataagtcaggacagtagtgattgacagggaggagacatgaggaagcctcctgggggacaagaaaggttctatatcttttttgggtagtaatgacaccagtggatacaatatgtaaagaaaaaaaaaaccccatcaaactaattacacaagatttgtatactttatgttcaatgt

SEQ ID NO: 1623 - DNA, 227 bp, Homo sapiens
  source 1..227: mol_type = other DNA
caagtgtctgcacagccttctgcactcccctagtctttacttaaatgtaacctcctctgaaagaccttccctggccattcctcttttgttgctctctgctacaactttgtcacaatctgattctctgttttgtctgtttcccaccggaatctatgctccatgagggcagcaactgatttgctcctgtgttcccagtacctagcaccacatatgtgacacacagaaag

SEQ ID NO: 1624 - DNA, 175 bp, Homo sapiens
  source 1..175: mol_type = other DNA
gacgataataggtgttccatgaagaagagcagcaggccctataagtttggttaacactaagtttaaacagtttcctttactgcaagacttctcagaacccttattatgctaatgtacaaggtgactccactagagggtgccttattatgcagcatttctaagcattttgaccacg

SEQ ID NO: 1625 - DNA, 242 bp, Homo sapiens
  source 1..242: mol_type = other DNA
ttttttttcagaatagtcatcttggaaaattattaggaatttattccaagaggtcctttgttcaacagtcttctggaaattcctttagagactggttcaaaagcttctgagctacaccaaaaaaattagtctcattattttcagaataccaaaaaagggtttttcccagttcgatcatccattttctttccctaccttggctccaaaatcaaacccacccttggaggatgggaatgtgctgc

SEQ ID NO: 1626 - DNA, 198 bp, Homo sapiens
  source 1..198: mol_type = other DNA
cctcaaggcctttgcacatggtgttcttgctggccggaacattcttctccctccttgccccagcagccccactacaatgtacgctccagcttaaatgtcacacccatggaaaggccatctctgaccactttatctacataggacctgaatgccttgtgattttctatttccattctgtttctttcataacatttaaca

SEQ ID NO: 1627 - DNA, 305 bp, Homo sapiens
  source 1..305: mol_type = other DNA
gcagggtgcggtggctcaggccagcaatcccagcactttgggagacctaggtgggcagatcacttgagatcaggagttcaagaccagcctggccaatatgtcgaaaccctgtctctactaaaaatacaaaaaaattagctgggtgtggcagcatgcacctatagtcccagctactagggaggctgaggcaggagaatcacttgaacccgggaggcagaggttacagtgagccaagatcgccactgcattctagcctgggcaacaagagtgaaactccatctcaaaaaaaaaaaaaaaaaaaaaaa

SEQ ID NO: 1628 - DNA, 197 bp, Homo sapiens
  source 1..197: mol_type = other DNA
cagacttgggttcagctctattgcttagtggctgcatgaccttgagttaggttcaccaactctctaagcctgagttttctcatctgtaaagtgggggtgataagagtgtcttcctcatggggttgatgtggagattaaatgggaccgtgcatgtattggatttgacacaggagctggcttagaataggcagtcaata

SEQ ID NO: 1629 - DNA, 219 bp, Homo sapiens
  source 1..219: mol_type = other DNA
ctctccttcatgctcccatgatactctgacccttcttccaacctagcactcctcacactatattgttactgtcagtttgctcatcaagaaccttaacctctaaacataaactcccagggggcagggaccacacttctattgtttgctattatatcaccacctatccgaaagtgtttagcacatagaagccacctgagaaatatattttggagaaatgga

SEQ ID NO: 1630 - DNA, 279 bp, Homo sapiens
  source 1..279: mol_type = other DNA
gggagtccccattctctatgctgggatggaggatgtgtgtgttcctggcaccccgggttagacctcagaatgcacactccccatgcgctgatacagatggtggttcagttctatggtactagtgttcaggtacattagggaataaataggcatttgtagctgcctgagaactaaaccatcatttataactctttatagggagaaatgtattctgaagttttagctaactgacatacaaacttttagagtataatcagtttgtaagtctgaggctgtgtg

SEQ ID NO: 1631 - DNA, 228 bp, Homo sapiens
  source 1..228: mol_type = other DNA
ccttatctcttttgacttctgcagcttttagcagagttgaccactttctccttgaaatattctctcatttgacttcctggacactcgactttttttgattcttctccctttctatacttctcgccaccctctatctgtctcccatacaagctcaccttcaaggcttggttctagacctctcttcttcttaccttacagtctctccccacagatcttgtcctcatccag

SEQ ID NO: 1632 - DNA, 206 bp, Homo sapiens
  source 1..206: mol_type = other DNA
atcttgtcagttccctgcaataaacttgccaatggcattttaggataaagacaaagtaaaataaaacatagaaatgccttaccatggcctacaaggcctctttgggctctgccaccaccctaattcccatttccctctcctgcaccagctgcatttgcttcctgtcagtccctggtgctctactggtttctaccatgtggtctttg

SEQ ID NO: 1633 - DNA, 527 bp, Homo sapiens
  source 1..527: mol_type = other DNA
catcagtgagaatggtgattattaaaaagtcaagaaacaacagatgctggtgaggatgcagagaaaaaggaaggcttttacattgttgatgggattgtaaattagttcaaccattgtggaagagagtgtggtgattcctcaaagatctagaagcaggaataccatttgactgagcaatcccattactgggtatatacccaaaggaatataaatcattctgttataaagatacatgcacacgtatgttcattgcagcactattcacattagcaaagacgtggaatcaacctaaatgccagtcgatgatagactagataaagaaaatgtggtacatatgtaccatgaaatactatgcagccataaaaaggaacgagatcatgttctttgcagggacatgatggagcttgtagccattatcctcagcaaactaaggcaggaacagaaaaccaaacacctcatgttcttgcttgtaagtggaagtagaatgatgagaacacatggatacatgcggagaacaacacatactg

SEQ ID NO: 1634 - DNA, 296 bp, Homo sapiens
  source 1..296: mol_type = other DNA
ggctaggcgcgatggctcacacctgtaatcccagcactttgggaggccgaggcagatggatcacgaggtcaggagttcaagaccagcctggccaaaatggtgaaaccctcatctctactaaaaatacaaaaattagccaggcatagtggcgggtgcctgtaatccagctacttgggaggctgagggaggagaatcacttgaacccgggaggcagacgttgcagtgagccaagatagcaccactgcattccagcctgggcaatagagcaagactctgtctcaaaaaaaaaaaaaaaa

SEQ ID NO: 1635 - DNA, 37 bp, Homo sapiens
  source 1..37: mol_type = other DNA
cacatacattatatgacctagacaagtgagtcctttt

SEQ ID NO: 1636 - DNA, 77 bp, Homo sapiens
  source 1..77: mol_type = other DNA
cttattcacactgaatctcccatgccttgtatagcactaggcacagaatggcattcagtgttttgagaatgaatgaa

SEQ ID NO: 1637 - DNA, 433 bp, Homo sapiens
  source 1..433: mol_type = other DNA
ggatttctgaaaacttccagggggtcagcgaggtcaaactattgccataatattactaagatgctatttgcctttcccaggcattctctcagaagtatatggtggggtctcccaaaggctacaatgacatgtggtctctcagcagactgaatgcagaaacagatgtgagaatccagctatcttctattaaaccatacatcagagatctgcaaaagtataaagcaataccactcttttcaatttaaatattttttttccataaaaactgttattttcatgaacatatagttatttttaatcaattaacattttaagtttattttactttctaatataatattaatataaataaacattgacaaaaactctagaatcctcaataacatgtaagcatataaacagatcccaaaatcaggaagtttgagaaccactg

SEQ ID NO: 1638 - DNA, 83 bp, Homo sapiens
  source 1..83: mol_type = other DNA
agcctacctgccttcctcattttccctctctgcaaaatgggggcagtttctgtctgactgagatgttgtgagagttaatgagt

SEQ ID NO: 1639 - DNA, 368 bp, Homo sapiens
  source 1..368: mol_type = other DNA
agggcctcttgcaggaaaagaaacctgagccacttccatagtatgaggcttcgagtgtactcagagatgaagaattgccaaaatacagctcaaaaagtggcattttcaaaaaacaatgtaaacaactcaaggacatagctcaaaattaaaatgtgacattacaagcccattcgaaggttaatttcctggatctgtgaactaaattaatccattattaatccacggtactctagaggttctgaggtctgggttgaggtgcaagtttcaaggaatatgaggaaagccatctttagaaggtgctggtgtatctgggacctggggaataaactgctttggagattggtcacaatctgagtcgagagccctcc

SEQ ID NO: 1640 - DNA, 297 bp, Homo sapiens
  source 1..297: mol_type = other DNA
ggctgggcaccgtggctcacgcctgtaatcccagcactttgggaggctgaggcgggtggatcacctgaggtcgggagtttgagaccagcctggccaacatggtgaaaccccatcgctactaaaaatataaaaaattagctgggcatggtggcgcacgcctgtagttccagctactcaggaggctgaggcaggagaatcgcttgaacccgggaggtggaggttgcagtgagctgagatcgcaccattgcactccagcctgggcaacaagagcgaaactctgtctcaaaaaaaaaaaaa

SEQ ID NO: 1641 - DNA, 80 bp, Homo sapiens
  source 1..80: mol_type = other DNA
ccaggagtgtgatgaaaagaaatcccagtatgatagctgtgcagcaggcctcgaaagcaatcggtccaaattagaacagg

SEQ ID NO: 1642 - DNA, 1141 bp, Homo sapiens
  source 1..1141: mol_type = other DNA
agatggattaaagacttaaatgtaagacctaaaaccatacaaaccctagaagaaaacccaggcaataccattcaggacatagacatgggcaaagacatcatgagtaaaacaaccaaaagcaatggcaacaaaagccaaaattgacaaatgggatctaattaaactaaagagcttctgcacagcaaaagaaactatcatcagagtgaacgtgtgacctacagaatgggaaaaaatttttgcaatctatccatatgacaaagggctaatatccagaatctacaaggaacttaaataaatttacaagaaaaaaacaaccccatcaaaaagtgggtgaaggatatgaatagacacttttcaaaagaagacatttaagtggccaacgaacctatgaaaaaaggctcatcatcactggtcattagagaaatgcaaatcaaaactgcaatcagataccatctcacgccagttagaatgacgattattaagaagtcaggaaacaacaggtgctggagaggatatggagaaataggaacgcttttacactgttgggtgggagtgtaaattatttcaaccattgtggaagacagtgcggcgattcctcaaggatctagaacctaaaataccatttgacccagcaattccattactgagtatatacccaaaggattataaatcattctataaagacacacgcacacgtatgtttattgcagcactattcacaatagcaaagacttggaaccaacccaaatgtccatcagtgatagactgggtgaagaaaatgtggcacatacacaacatggaatgctaagcagccataaaaaaggatgagttcatgtcctttgtaggaaaccatcattctcagcaaactaacatggaacagaaaaccaaacatcgcatgttctcactcataagtgggagttgaacaatgagaacacatggacacagggaggggaacatcacacacaggggcctgtcagagggtggtgggctaggggaggggatagcattaggagaaacacctaatgtagatgatgggttgatgagtgcagtaaaccaccatggcacgtgtatacctacgtaacaaacctgcatgttctgcacccgttatcccagaacttaaaatataataataaaaataaaa

SEQ ID NO: 1643 - DNA, 172 bp, Homo sapiens
  source 1..172: mol_type = other DNA
cttccactcttgagtagatacagcaggttccagcaggcaaaatattcttctgcagcagctaggataagataaataaaaggccaaaattatattttcaattcatcggagagctgtgcaaacaaggagggccagctaaactaaaatccagcacaaggagagtctttataggtga

SEQ ID NO: 1644 - DNA, 294 bp, Homo sapiens
  source 1..294: mol_type = other DNA
tgtctataatcccagcactttgggaggctgaggcagtggatcacttgaggtcaagagttcgagaccagcctggccagcatggtgaaaccccatctctactaaaaaaaaaaagaaaaatacaaaaaattagccacgtgtggtagcgcatgcctggagtcccagccactcaggaggctgacgcatggaaatcacttgaaccccagaggtgaacgttgtggtgagccaagattgtgctactgcattccagcctggacaacagggcaagactccatctcaaaaaaaagaaaaaaagaa

SEQ ID NO: 1645 - DNA, 1901 bp, Homo sapiens
  source 1..1901: mol_type = other DNA
agctacaacaggctttgaagacatagacagtacaataagatattaatagtgaaaacaaaaagttaaaacctgagaagatggagttaaggtgcagagtcctcatttgttttgtttttgtgcttgtttgtttgcttatgtaaacagtactaagtggttattagcttgaaatgatgggttagaagatagcatttgcaagcctcatggtaatctcaaacctaacagcatagaatggatacacaaaaaaataaaaagcaagaaactatatcatatcaccagagaaaataaccttcactaatgaaaaataggaaggaaggaaagaaagaatagcagactacaacataaccagaaaagaaataataaaatgacagaagtaagaccttactaccagtaataacgttgaatgaaaatggactaaactctccaatcaaaagacatagtttggctaaatggaaaaacaaaacaaaaaaaaactccaatctgttgcctctaagaaacacactttgcctataaagacatgcacagagagaaaataaagggatggaaaaagatattccatgtcaatgcaaaccaaaaaaaaaaaaaaaaaaaaaaacaaaaaagtagagtacctatactaatattagacaaaatagttttcaagacaaaaactatgaggacataaagaaggtcaccatataacgataaaagggtcaattcaccaaaaggatatagcaattgtaaatatatgtgcactcaacactggagcacccagatatataaagcaaatattattagagcaaagcaaagagaaaagcctcaattcaataatagatggagacttcaacattccactttcagcattggacagatcctccagacagaaaatcaacaaagaaacatcagacttaatctgcactatggaacaaactgattattagatacttacgtaacatttcacccaaaagttgcagaataaacattcttttcctcagcacatggatttttctcaaggatagaccatatgttagatcacaaaacaagtcttaaacaatccaaaaaactgaaatattgccaagcatcaactctggccacaatgggataaaactagaaatcaataacaagaataattttggaaactatataaacacatggaaatgaaacaatatgctcctgaatgaccagtaggtcaacaaataaatttaaaaggaaatggaaaattgctagaaacaaatgatagtggaaacaaaacataccaaaatctatgaaatacagcaaaaacaatactaagaaggaaatttacagctataaaagcctacatcagaaaagaagaaaaattcaaataaacaacctaattgtgtatcttaaagaactagaaaaacaaaagtaacccaaacccaaaattagtagaacacaaataataaaaattacagcagaaataaatgaaattgaaatgaagaaaacaatacaaaagatcaatgaaacaaaaacttgttttcttgaaaagttaaacaacattgacaaacgtttaggcagactaagaaaaaaagatccaaattaataaaatcagagatgaaaatggagatattacaactgatacaacagaaattcaaagaaatattagtgactagtatgaacaactatatatcaataaattggaatctctaaaacaaatggacaaattcctagacacatacaacctacaaagatcgaaccataaagaagcccaaaacctgataagaccaaaaacaggtaatgagataaattctgcaataaaatgtctcccagtttaaaaaaaaaaaaaaaaaaaagcctgggagcagacggctttagatctgaattctaccaaacatttaaagaactgatgccaatcctactcaaactcttctgaaaaaatagagaaagagggactacttccaggctca

SEQ ID NO: 1646 - DNA, 161 bp, Homo sapiens
  source 1..161: mol_type = other DNA
agtggtttgaaaacacgtctaagtgctttgactcacctcatatggatagatggagtctattcccctccacatccaaactagccttcatgatgtgttaagtaaatgttctgtcacagaactgacacagaagaacttccaatgtttaaaaagctggcgccttc

SEQ ID NO: 1647 - DNA, 390 bp, Homo sapiens
  source 1..390: mol_type = other DNA
gagacttatttgtctaccgaattattgttttctttgtcggacatacacctacactgcattcctcaaagtaaaatttaagtgtggctctgtgcctatgctctccccagcggaaagtgaccagaagaggtgtgcagtttccaggcctggcccatacagacctccaacaggtgctcccctgtgctgttactccttctgccaactggaagcagatggtgaccaggctctggagaaggcaaggcctgaagatgggagattcctaagtggaggagaactgtgccttactgacctaaatatccactcagtattgttatgtgagaataaataaacttgtgttgaccgtttacttactttgagtcttttgttctagcagctttgcctatgctacctaat

SEQ ID NO: 1648 - DNA, 281 bp, Homo sapiens
  source 1..281: mol_type = other DNA
ccaggcacggtggctcacgcctgtaatcccagtactttgggaggccaagggaggtgaatcacttgaactcaggggttggagagcagccggggcaatgtggagagacccaatctctacaaaaaaaatacgaaaaattagccaggcatggtggcatgcgcctatagtcccagctactcaggatgctgaggtgggaggatcgcctgagcccaggaggtctaggttgcagtgagctgtgatcacgccactgcactctagacagtgggaccgtttaaaaaaaaaaa

SEQ ID NO: 1649 - DNA, 423 bp, Homo sapiens
  source 1..423: mol_type = other DNA
ccaacctcaccctttatcagtctcctcctactcgatctactccagctacaatgaccttcttgctgattcttgaacatatttagcttatttccaccttaaaatttctacccatctgcccagaaatctttccttggatttccaatagccagccctttctcattcctcaggggtctcagcttaaatgttacctcctgagattccttccttaatcatctaatacgaagaagtccccacatccagttattctcttacctcagcatcctgtttatgttcttcttagcatcagactcgggctttttcctgtttattacctacttcgttttcctgaaagatccatgtgccggtaccatgtgttgttcctactgtttctccaatgtctagtagatttggcacatactgatgtgcaattaatacgtgaatgaa

SEQ ID NO: 1650 - DNA, 159 bp, Homo sapiens
  source 1..159: mol_type = other DNA
aaacctggggtcccattctagcttgaccacttctcggctgtgcacaaactagtctagctctcctgagcctcagttacctattttgcaaattagggatgggaacatccatacctcacgacgccaaacggctaccttgtaaagacgaaaggaggaaatgca

SEQ ID NO: 1651 - DNA, 238 bp, Homo sapiens
  source 1..238: mol_type = other DNA
gatgtgagggcaatctggctgcgacatctgtcaccccattgatcgctggggttgattcggctgatctggctggctaggcaggtgtgcccttcctccctcaccgctccatgtgcgtccctcccgaagctgcgcgctcggtcgaagaggacgaccatccccgatagaggaggaccggtcttcggtcaagggtatacgagtagctgcgctcccctgctagaacctccaaacaagatgtcaa

SEQ ID NO: 1652 - DNA, 58 bp, Homo sapiens
  source 1..58: mol_type = other DNA
tgcccccagtgcccagcacagggccaggcacacagtggtgcacgggaacgtctgctga

SEQ ID NO: 1653 - DNA, 185 bp, Homo sapiens
  source 1..185: mol_type = other DNA
tagcagtgtagccaagtacacaagctctggactcagatttcacttccaccgttttagctttataggtgtgacctacacatgtgacttcacctcagttttgtgatccgtaaaatggacaaattcgaagctacttcacagtgctgttgagaggattaaatgaaacaatgcttgtaaagctctttgca

SEQ ID NO: 1654 - DNA, 273 bp, Homo sapiens
  source 1..273: mol_type = other DNA
ttttctttctctatgcttttattcattctattcccttctcctgaaacaaatacgctacctcttcgtttctgcatttcatcatatacttctttcaaacctcatcattttgaaatactacctcctcctcaaagccttctcatttccccaaagcagcaataattgctgaattaacatagcatagctataattattgcataaaacatcattttatatatagcattttatttagttgtgtatcttcatgttttctctatcctacttgactgagaaccc

SEQ ID NO: 1655 - DNA, 198 bp, Homo sapiens
  source 1..198: mol_type = other DNA
gggacagagtggtgtagtgaaacaaaagcagtaaaccaagtatcacaaagcttggactttagtaccagcttttgcactttcctcactgtaaagatgttgtatgggttacttaaccagttggggtttaatttccttggctgtatagtggacttagtgtcacatgcctacctcaggatttctgtgacaattaaatatgat

SEQ ID NO: 1656 - DNA, 217 bp, Homo sapiens
  source 1..217: mol_type = other DNA
aatacaaaatagtggttaagaccaaggactatggagccagagcccctcctctctcacttacgtgttctttggtttgagagactacttgacctctccatgcttcagtttcctgtcaatcagcaggaaatcatagtatagtccctacctcacagtaatgataaaatgagttcatacataaaaagtgctttaaacaaagcctgacacacaaataatgctc

SEQ ID NO: 1657 - DNA, 181 bp, Homo sapiens
  source 1..181: mol_type = other DNA
actatatatttctttattatttgacacgtgtatttgtttaatggccctctgctccaccagtatggaagctccaaaaggaaagataccagattgatcttgatcacctctgcctccccagcacctagtcttccttggcacatcgtgagtgctcggtaaatatctgtggctttaatggatgaat

SEQ ID NO: 1658 - DNA, 442 bp, Homo sapiens
  source 1..442: mol_type = other DNA
tataaaaatgtactgtagtaatcagtaagaaaaagaaacaacattggctaagtcacgaataggcatttcaccatatgtacatgataaatggccaatcaaaataaggaatggggctcattctgctggaaattaaatacattcaaacaagaacagagatccattagcaaaatgtttaaaaataatatcacagggttaccaggggtatgacaaaaatggacacttccatacacactaggtgaatatattggtgaaaatagttcagataaacatacaaccatgtatgtaaaagtatttatcatcaatgcattatttgtagtagcaaaaacaacaagcagccttggaaaccagttaatgtcctcagcagggaattaataatattattgtatattcatgaaattgacaccatgtggccacacaaatgcattacacaggcctctatgta

SEQ ID NO: 1659 - DNA, 300 bp, Homo sapiens
  source 1..300: mol_type = other DNA
ggccaggcaaggtggctcacgcctgtaatcccagcactttaggaggccgaggcgggtggatcacttgaggtcaggagttcgagaccaacctggccaacatggtgaaaccctgtctctacttaaaaaaaaaaaattagccagacgtggtggtgggcgcctgtaatcccagctactcgtgaggctgaggcagaagaatagcttgaacccaggggctggaggttgcagtgagccgagatcatgccactgcactccagcctgggcgacagagcaagaccctgtctcttaaaaaaaaaaaaaaaa

SEQ ID NO: 1660 - DNA, 81 bp, Homo sapiens
  source 1..81: mol_type = other DNA
tagcccagccacaccaccttgttgtgtgaccttgggcaggtggttctgtctctctgagcctctgtttctctctgagctgag

SEQ ID NO: 1661 - DNA, 64 bp, Homo sapiens
  source 1..64: mol_type = other DNA
gcgctatcctgtggagaaatctaccactacactatccagggaatctgtggtcagtcctcacccc

SEQ ID NO: 1662 - DNA, 89 bp, Homo sapiens
  source 1..89: mol_type = other DNA
gtgaaatgttaagtccccttttatgtgttttgcaactatagaatgtgcaacattttcatcaagatagaaaaggtaaagaaagcaaaact

SEQ ID NO: 1663 - DNA, 286 bp, Homo sapiens
  source 1..286: mol_type = other DNA
cacggtggcttttgcctgtgatcctagccctttgggaggccaaggcatgccagaggatcccttgaggccaggagttcacgaccagataggcaacatagcaaaacccccacctctacttaaaaaaaaattaactggacgtggtgatgcacatatgtagtcccagttacttaggaggctgaggtgggaggatcacttgagcccaggagttggaggctgcagtgatctgtcaccactgcactccagcctgggtgacagagggagacccctgtctcagaaaactaaaaaa

SEQ ID NO: 1664 - DNA, 67 bp, Homo sapiens
  source 1..67: mol_type = other DNA
aatgagatgatacatgtaaaatacttaacacagagtctgtcttccaagaaatgatagctgttattct

SEQ ID NO: 1665 - DNA, 258 bp, Homo sapiens
  source 1..258: mol_type = other DNA
cagagggcagagcaacacagaatagacattaaaggaacagactttgaggccaggcagccttgggtgtgcatctgtccctactaagccatgtgacattaaacaagtgagtccacctctctgagcctcaggttcctcatctgtaaaatggggattataagagttcttgtttctcagggacaatgtgaggattaagtgagatgatacacatagagaatgtggtgcagtactgggcacatggcaaagatcagtgatgctagc

SEQ ID NO: 1666 - DNA, 268 bp, Homo sapiens
  source 1..268: mol_type = other DNA
tggctcatgcctataatcccagcactgtgggaggctgaggcgggtggatcacttgaggtcaggagtttgagaccagcttggccaacatggaaaccttgtctctacaaaaaaatacaaaacaattagctgggcatggtggtgcatgcctgtagtcccagctactcaggaggctaagctgggaggatcacttaggccctagaggtcaaggctgcagtgagccatgataatgccactgcactccagcctgggtgacagaatgagatcctgt

SEQ ID NO: 1667 - DNA, 288 bp, Homo sapiens
  source 1..288: mol_type = other DNA
ggctgggtgcggtggctcacatctgtaataccagcactttgggaggctgaggtgggccaatcacgaggtcaggagttcgagaccagcctggccaacatagtgaaaccccatctctactaaaaatacaaaaattagctgggcgtggtggcgggcgcctgtaatcccacctacttgggaggctgaggcaggagaatcacttgaacccgggaggcggaggttgcagtgagccgagatcgcaccactgcattccagcccaggcaacagtgcgagactctgtcaaaaaaaaaa

SEQ ID NO: 1668 - DNA, 335 bp, Homo sapiens
  source 1..335: mol_type = other DNA
ataactgttggtaggagttgtttgagctattctggagattatttggtaaagtatactaaaagccttaaaaccatgtatgtgcgctgtttgaacccgtaagccacttctttgacattagaagacattagaagaaataatcagccttgcataaaacttatggatgaaagtattcatcacaatattatttataataaaaaattgcaaatgttataaatgaacaattgggaaatggttaaagaagtgatggtgcattgtgtggtagaatattatgcatatgtttaaagaatcatattttctaagattatttggaagcatgtttggtaatgtcaagtgga

SEQ ID NO: 1669 - DNA, 315 bp, Homo sapiens
  source 1..315: mol_type = other DNA
gctgggcacggtggacggtgcctcacatctgtaatcccagcactttgggaggccgaggcgggcggatcacttgaggtcaggagtttgagaccagcctggccaacatggtgaaaccccgtctctactaaaaatacaaaaaattagccaggcatggtggcgggcacctgtaatcccagctactcgggaggccgaggcaggagaattgcgtgaacctgggaggcggaggttgcagtgagctgagatcgcgccactgcactcaagcctgggcaacacctgggtgacagagcgagaccccatctcaaaaaaaaaataaaa

SEQ ID NO: 1670 - DNA, 140 bp, Homo sapiens
  source 1..140: mol_type = other DNA
gccgggcgtggtggctcactcctataatcccagcacttcgggaggccaaggcaggtgcatcacttgaggccaggagttcgagaccagcctggtccacatggcaaaaccccatctgtaccaaaaaatacaaaaaatttgcc

SEQ ID NO: 1671 - DNA, 310 bp, Homo sapiens
  source 1..310: mol_type = other DNA
ggctgggcacagtggctcacgcctgctatcccagcactttgggaggccgaggcaggtgggtcacttgaggtccggagttcgagaccagcttggccaacacggtgaaaccccatctctacaaaaatacaaaaaaattagccaggcgaggtggtgcatgcctataatcccagctgctcaggaggccgagacaggagaattccttgaacctaggaggcagaggttgcagtgagcctagatcgtgccattgcactccagcctgggcgacagagtgagacttcatctaaaaaaaaaaaaaaaaagaaagaaagaa

SEQ ID NO: 1672 - DNA, 55 bp, Homo sapiens
  source 1..55: mol_type = other DNA
tcactaggcattctatctgaaaacggacggcagcttactttttggttaattgcaa

SEQ ID NO: 1673 - DNA, 296 bp, Homo sapiens
  source 1..296: mol_type = other DNA
ggccaggcgtagtggctcacgcctgtaatcctagcactttgggaggccgaggtgggtggatcacctgaggtcaggagttcgagaccagtatggccaatatggcaaaacctcatctctactaaaagtacaaaaatttgctgagggtgttggtgggcacctgtaatcccagctacttgggaggctgaggcaggagaattgcttgaacctggaaggtggaggttgcagtgagcccaaatcgtgccattgcactccagcctgggtgacaagagttaaactccgtctcaaaaaaaaaaaaa

SEQ ID NO: 1674 - DNA, 958 bp, Homo sapiens
  source 1..958: mol_type = other DNA
caaaagatggcgttggcacaactggccgcctgtctgagaaaaacaatctggactgccacattccaggtagatcaaagatttagatataaaaataaataaaaccacaaaagtactgggccacatctccaatgaatgctttcatatcgtggagtaggaaatacaaagcccaggataaaaaagaaaagccttgtaggtttgactacggaaaaatgtaaagcttttctgtggaaaaaataccgtaagcaaagtcaagacttatgacaagcttggagaaatacctgcaacactggcagaccaagggctaatttctttgatttgcaaagagctcttaaacatcaatgagaaagatggagacctcactaaaaatgaaatccagatacaaaaggacaattcacagaaaaacaaacacaaaatgtctgtaaagcatgcaaaatacgctcagactcaccataattaaagacatgcaaaacaatgagatattattttcacctatcagggagacagtgatccaaaatgttaagaacgcagcattgcagcggagtgaggaaagaagcactctcatagactgtggtttcagcctttctaagaaccatccaacaagagctatcaaaatttaaaatgcacaagctctttgatccaactcttccactgtcagaatttacccatggaatatacccctatgcatattcatatacatgtgcaccagaatgttatttgtattagcaaaaaaaaaaaaaaaatggtaaccaccgaaatgtaggcagttaccatatttttaggatacagaaggaggagaaaggatatgaaacatttgtacaatggcatactctaaaaaagaacgagctagctgtgtactaatatggaacaagtgccaagatatacacttagataaaataatcgggtatgtaagagtatgcttcaaagtcttcaaaagaaaaggaaaaacaaaagatacaga

SEQ ID NO: 1675 - DNA, 128 bp, Homo sapiens
  source 1..128: mol_type = other DNA
tctggattttaatccagacatctctgctaacaagcctttggtaagtcacttcagatacttttcctcctttttacaaagagagggctggcttagttatttgccaaagccccttccaggcctgaattcca

SEQ ID NO: 1676 - DNA, 185 bp, Homo sapiens
  source 1..185: mol_type = other DNA
agttgaaatatcattgatagaattttagttttaggaaaaattggtttgatttctagctttattactattaggtatgtgagcttgggcaaatcgcttaatctttgagtctagttttctctcaaaatgagaacattaggctaaatgatttccgagtttccagctagtcctagagttctatatttcta

SEQ ID NO: 1677 - DNA, 398 bp, Homo sapiens
  source 1..398: mol_type = other DNA
gctatgaactgtatatttctgtcccccctccctcaacttatacgttgaagccctcaaccccaatgtgactgtatttggagatagggcctgtgaggaggttataaagatgaaatgagctgataaggttggggccctaatccaaagagactgatgctcttttaagaagagaaagagacatcagagtcctctctctctgaacctgtgtcaaggaaaggccgagtgaggacacagcaagatggcggccacctaaaagccaagagaagaggctttagggtaaaaccatcttgacagcatcttgatcttggacttaccagtctctagagctgtgaaaaagaaatttctgttacttaggccacccagtctgtggtattttgttatgacaatctgaccacactaat

SEQ ID NO: 1678 - DNA, 295 bp, Homo sapiens
  source 1..295: mol_type = other DNA
cccggtgactcacgcctgtaatcccagcactttgggaggctgaggtgggtggatcacaaggtcaggagtttgaggccagcctggccagcatggtaaaaccccgtctctactaaaaagaaaacacaaaaaattagctgggtgtggtggcccatgcctgtaatcccagctactcgggaggctgaggcaggagaattgcttgaacccgggaggccgaggttgcagtgagctgagatcgcaccactgcactccagcctggatgacaaagcgagactccgtctcaaaaaaaaaaaaaaaa

SEQ ID NO: 1679 - DNA, 313 bp, Homo sapiens
  source 1..313: mol_type = other DNA
gccgggcatggtggctcacgcctgtaatcccagcactttgggaggcagaagcaggtggattatctgaggtcaggagttcgtgaccagcctggccaacatggtgaaaccccgtctctactaaaaatacaaaaaaaaaaattagccaggcatggtagcgggcacctgtagtcccagctacttgggaggctaaggctggagaatcgcttgaacccaggaggcgaaggttgcagtgagccgagattgtgccactgcactccagcctgggcgacaagagcaaaactctgtctcaaaaaaaaaaaaaaaaaaaaaaaaa

SEQ ID NO: 1680 - DNA, 303 bp, Homo sapiens
  source 1..303: mol_type = other DNA
ggccaggcatgctagctcacgcctgtaatcccagcacttggggaggccgaggtgggtagatcacgaggtcaggagttcgagaccagcctggccaacacggtgaaaccccatctctactaaaaataaaaaattagccaggcatggtggtgggcgcctataatcccagctacttgggaggctgaggcaggagaatcgtttgaacccaggaggcagaggttgcagtgagccgagatcgcgccactgcactccagcctgggtgacagagcgagactccgtctccaaaaaaaaaaaaacaaaaaaaaa

SEQ ID NO: 1681 - DNA, 590 bp, Homo sapiens
  source 1..590: mol_type = other DNA
gaagagttctccttactgctgtgatggaataacaagggtcagatttcctctcctgccttaaacaactggaagctatacaatacgtataataggtaatggtttttagacataggacaagcacaggtttgtgatcctcaggagactgcagacagagtgaggtgagcaccatggtttctcagcctgcccccgcatggcagttcctaggttgcagttcagggaagggaaacaataaatctcgctgaattgaagagacaggactggcagttggggaggccacagcagctagaatttccaggggaaagtactggagagatgggatccttctagatacagggctcaagaagtctgctgggagtcccctgagtcctttgacttagtactgacttgcactgaggccaggaaaagaagcactggaaagcagcaggctgaacaattcctggaactcatgcagggctgggaatagtttatgttctcagcagccagagtggaaacagagtggaaacacatggagcatcaggtagaattctcagaaaggttttgttttagtagtgcagctaattaactctagattaaaagctactctggaccta

SEQ ID NO: 1682 - DNA, 310 bp, Homo sapiens
  source 1..310: mol_type = other DNA
gccgggcacggtggctcatgcctgtaatcctagcactttgggaggctgaggcgggcggatcacctgaggtcaggagttcaagacaagcctggccaacatggtgaaaccctgtctctactaaaatacaaaaagtagccaggcatgatggcaggtgcctgtaattctagctacttggtaggctgagacgggagaattgcttgaatccgggagatggtggttgcagtgaactgagattgcgccactacactccagcctgggcagctgagtgagactctgtctcaaaaaggaaaaaaaagaaaaagaaaaaaaa

SEQ ID NO: 1683 - DNA, 140 bp, Homo sapiens
  source 1..140: mol_type = other DNA
gaggttctgagctccccgcatctggaaattttaagatctgtaggatggccatctgttcaagatggtgtaaaaattagatttctgcatacagtaggagaatgaatgagatccaagatccctcccaaatttagaattctgtg

SEQ ID NO: 1684 - DNA, 56 bp, Homo sapiens
  source 1..56: mol_type = other DNA
gaagttgaacttggtggttctttcagaccccttatggctctgagattctaagattc

SEQ ID NO: 1685 - DNA, 281 bp, Homo sapiens
  source 1..281: mol_type = other DNA
taatcccagctacttgggagactgaggtgggaggatcacttgaacctaggagtttgagaccagtctgggcaacatagtgagaccctgtctctaaaagaagaattttaaaaagcagggtgtggtagtgcatgcctgtagtcccagctacttgggaagctgaggcaggaggattgattgagccccagggctttgaggctgtagtcagctatgattgtaccattgcactccagcctgagcaatgaaacaacaccctgtctcaaaaaaaacaaaaacaaaacaaa

SEQ ID NO: 1686 - DNA, 147 bp, Homo sapiens
  source 1..147: mol_type = other DNA
agttatttgaccgctcatctgtttcctcatttagaaagtggaagtcgcaatgtcaattgcaaagggaaatgtgaggatgaattcagattgtttatgtaaaacacctagtgtctgacacatggcagctactaataatggggttgcttt

SEQ ID NO: 1687 - DNA, 37 bp, Homo sapiens
  source 1..37: mol_type = other DNA
ccttgggtgaaaggtgctatataattgtgaagtatta

SEQ ID NO: 1688 - DNA, 70 bp, Homo sapiens
  source 1..70: mol_type = other DNA
aagctactttctggtaatatattaggcatttctgcaatagctctttcaggtaactgaatattattaagca

SEQ ID NO: 1689 - DNA, 249 bp, Homo sapiens
  source 1..249: mol_type = other DNA
aatttggtaccaggagtggggcattgctataaagatacttgaaagtgtggaagcacctttggaactgggtaacgggtagaggttggaagagtttggagggctcagaagaagacaggaagatgaaggaaagtttggagcttcctggagacttgttgaatggttttaaccaaaatgctgacagtgatgtggacgattaagtccacactgaggtggtctcagaaggagatgaggaacttattgggaactgga

SEQ ID NO: 1690 - DNA, 634 bp, Homo sapiens
  source 1..634: mol_type = other DNA
cacccttagatcaggcgggaggccttctctaggcctgtgctttcctggctttgctccaaccctcctccagccacaccctcccgggggcaagaagtccttgggctcaggaccaaaggagcacacccacctggaggccacaccctgctgccagactgcattttgattgctcgtgctgccaaagtccctggccaaatgtcctcatgctcatgactaagcccctctccctgggcctgtcaaatagagagtggactgtgttatgggatggcctatgagatggcccaggggcagctgtctgcaagatggggcatgggtgagggctgttctcagatgtgtgggccggagtacccactcatatgcactccgtgtctctcatggtgggagatggggcagaggaggaagggagaagaaagtcaagctatgagcagagagcctgacacccactcccccagtaagccgacttctaccccaggactacaaggagtctgagttttttcaatttaacctgaccttctaggtatttctatcaaggtaggacaatagaacacttttatttaatggcttgttaacttgatattacaactttcaaatatgtagatatatggtgtgcctctatgtgagctcttacccttgaccc

SEQ ID NO: 1691 - DNA, 76 bp, Homo sapiens
  source 1..76: mol_type = other DNA
gccgctatgagttagagtctatcagtgttcttgttataaccccctattttcagggggttaaaaatcagctttaaaa

SEQ ID NO: 1692 - DNA, 261 bp, Homo sapiens
  source 1..261: mol_type = other DNA
atacctcctgccatctgtacttcctcccctgcccttctgtagaggtagctctcttccccactgactccacactgcacttccaacactagggacctctctgttcagatcttacttcacttcctggcagcgttcagcatcgttgagccttaacacccttttctcctgacttctatgacatcatacccttctgggtttcatgctgctttcatgaccattccttttctggcccttttctcactgctgcaatcctgctggtctccc

SEQ ID NO: 1693 - DNA, 615 bp, Homo sapiens
  source 1..615: mol_type = other DNA
ttgtggaagacagtgtggtgattcctcaaggatctagaaccagaaataccatttgacccaacaatctcattactggatatatacccagaggattataaatcattctgtgaagacacatgcacacgtatgtttattgcagcagtccaaagacatggaaccaacataagtatccatcaaggatagactggataaagaatatgtggcacatatacaccatggaatactatgcagccataaaaaagaatgagttcgtgttctttgcagggacacgggtgaagctggaaaccatcatccttagcaaaccaacacaggaacagaaaaccaaacaccacatgtcctcactcataagtgggagtttaacaatgagaacccaaggacatggggaggggaccatcggacatggggaggggaccatcacacactggggcctgtcggtggtgaggggcaaggggagggagagctttaggatgaatacctaatgcatgtggggcttaaaacctagatgacaggttgataggtgtagcaaaccaccatagcacatatatacctatgtaacaaacctgtacactctgcacatgtatcccagaacttaaaaataaaacaaaacaaaacaaa

SEQ ID NO: 1694 - DNA, 75 bp, Homo sapiens
  source 1..75: mol_type = other DNA
ggtaaaacaagtttgggaaatgctagttacgcagttaatggtgtagttaccgcaggacttgacaaaacctctaat

SEQ ID NO: 1695 - DNA, 140 bp, Homo sapiens
  source 1..140: mol_type = other DNA
ctcaaactgaaaaatcaagtaatagtataaacgatttgctttgtattaataatatgaagttaaaacatcagaggacttcaacaatttaaaaattaagtggattcctctagggagtgggaattgactaaaggaaaggatga

SEQ ID NO: 1696 - DNA, 1490 bp, Homo sapiens
  source 1..1490: mol_type = other DNA
aagtggtgtggtacagggagaaaaacgaacagcaaaaaacagaaaagactttcatttttgactacttaaaaggctttatttacataacaaggccacctttttgctagtcaggccaaccaaaagagcaatggctgtcgtctcacgctgctgttccatagctaagggttctgccatctttttttccaccacaatagcctgggtttgtttcctaaatcaagccctttctggtttgatacttggtacttctaaaataacagcaatttgttccagctgaactacggtcataagatttaaaaagattttttttaaggagctcagtggttaaaagtcagcttaattacaagctaacatccaaaaatgtatgcatgtgtgtctatgtgtttgtatttaaaaggccttcatgttggcattttttttctcctaggaccttgtctttttctttttctttttttttttttttttttttgagcaaaagtttttttcttctcagttgactgaattctgttttcttcatttacttcttctgtctcttctttctcttgcaccctctgctgaatgaggaacctaaaatagtttataacagccttaaagaaaacagagaaagtgccagactccctttgggggagaaaccggtttttccttatggaatcccaagagcataaacagaccagttcatctcaactcttaaactatttgcttttgtattttgttatctgatttattgactaaaataattattgcaacagaggctactctcaggtttttagggagagtgtagtttagacactcagaaaagtctttgtttaaaaaaaccttttttaaagtgcactgtaaaagcatcacatggtctagcctcataataattctccttttttggagacccaggattcaatgtgggctctgcccagagctcagatccagttaaaagacaagtagtccctatctaaataaaactggtctcctcttacagtcctatggtagatttgtataattttgtgcttgacatccatctttaatctctctccagctctaccagactttttctttcagtaccttgagatgtaaattttgctatctgatttttcactaagagttgtttccttcaatatgcagatttagggctatttagctgacaactgccagagtgatgaaacagattatcaagagtttgcaagtctaagataggaaaaacacaaaagaagaggtcttaggaatctataaatgtacttctatcggtatgcctaatatatctctttatttatgtgctgtgtacacaatgtttcactgctaaaaatatataaaagagctctaatgaatgggcttaaagaaaaataaaagtgcttaaatcaaacattttatcagaaaaaaggatagactagtcaaatgctttttcaagtgtacatgacttaagtagaatctttaataaataagctagctttaaaattacaggtacggtaatattagaattgtcttaagaatttccagcatac

SEQ ID NO: 1697 - DNA, 539 bp, Homo sapiens
  source 1..539: mol_type = other DNA
cagcagttctcccatatctgtggttttgttttccatggcttcagttgtctatggttaatttggtccaaaaatattaaatggaaattccagaaataaacaattcataagttttaaattgtgctctgttttgagtagcgtgatgagatttcactttgtcccactatgtcttgcctgggatgcgaatcttccctttgttcagcgtctccacactgttgacacttgctgcccatgagtcacttaatatccatcttggtggtgggatcaccgtgcttgtgttcaaggaacaccgattttattttaccagtggccccaaaatgcaagactgatgatgcaggtatattgttataattgttctattttattattagttattattgttcatctcttactgtgcctaatttataaatcaaattttatcataggcatgtatgtataggaaaaaataggaaaaaacggtatatagggcttggtaccatctgaagtttcagacatccactgggggtcttggaatgtatcctccacagataagaggagattcc

SEQ ID NO: 1698 - DNA, 373 bp, Homo sapiens
  source 1..373: mol_type = other DNA
tgatattgtttggatgttttttccctccaaatttcgtgttgaaatgtgaccgccatgttggagttggacctagtggaaggtatttgggtgatggggaatctcttgtgtggctatgtaccttccctgcagtaatgagttcatgaaagatctggatgtttaaaagagtctgtgatcttcctcctctctctcttgctcctgttcttgccaggtgatatgccaactccacctttgccttccaccatgtttggaagctccctgaggcctcaccaggagcagatgctcgtcccatgcttcctataagcctgcagaactgtgagccataataaactgtgaattataaattgcctttatagcaatgcaaatggaccagtac

SEQ ID NO: 1699 - DNA, 156 bp, Homo sapiens
  source 1..156: mol_type = other DNA
tttctccatcttccatcattcactatcctaatttatcatctctcatttagattgtttcctcttaactggtctccccgcctgaaacccatcctccatgttgccggatgagctcttggacacagaaatctcactgtgtcactgacctgctaaaagccc

SEQ ID NO: 1700 - DNA, 1310 bp, Homo sapiens
  source 1..1310: mol_type = other DNA
gatcccaatgaggggaaaccatatttcactgggagagcaaactgctagcatttatcatcccctccagctttaagttacagaggctaaactcctggtgagtgtgccaatgtggtcagaggttctcttcctccacccagcccctacgcatagggcagagtttctaccccaggtgtggcaagcctagaatactggggctctaattgccctcaccccaccttgcttgtaaggtgcaggtctgtgcagcttctcaagctgccattaccttgcttgtaagggagagaagttcaacactgagaaaggcaagccaagaataccaaagactgctccccctacccagcccccagagcagtggctgagagattttgcccactgagagaagcagtctgtaagaacagagaactccaaaaaccctccccaaaggaattgattttatttgaagcacagtgtggggaacttcaagcctaaggatgctttcagaaacgagaggctttggtggtaagcaaataagagcccactgctagcttcttttaagagcagtaggctaaacataggccaactaattcacaaaagagaatcagagaaggagctaagaagagcgctccctcttgaggggtcagatcaaacctcaaagactggccaaagaaccccaccccctagtttatttggatgagactgtgaaacaatttatactctagaacattgttgaaaacaatagagcaatcagctgggaattggttgagctacaaagctgagcgggataccagatgaggcaaaagagagataagggaaagagacagagtcctgctaacatgacactgtcattgctggtaactgtgtgcatgcccagtgctgaccctccgaggagtagcaccaaaggcttcacgctgcaggagaaatagacttcccaaaatagtcaagttactcaacaaataaagcaacaaagacaagcccagagagggaggagaggtctcagtaaattcagttgattaaatacattacctaaaatgtccaggtttgagcaaaaatctgacacatgcaaagaaacaggaaagtgtgccccatacacaagaaaaacagtaaacaacaaattatgaaaggacccagatgtgaaatttaacagaaaaaacttaaaggtcagaggaaaccatccttgtagaagtaaaggaagatatgatacactgcctcatcaaattgagaatattggtaaatagatagaaattataaaaaaattataaaaaagaatcaaattgaaattctagagtaaaaagtataataacaaaaaaaatttactaaaggggctccacagttga

SEQ ID NO: 1701 - DNA, 104 bp, Homo sapiens
  source 1..104: mol_type = other DNA
ctcctctaataaactgaagaactctaagtgattagcccctgtcctacatctgcacagtggacggcatactccaggcactcataagtgtttgttgaatgcatgaa

SEQ ID NO: 1702 - DNA, 97 bp, Homo sapiens
  source 1..97: mol_type = other DNA
ggcggaggttgcagtgagccgagattgtgccattgcactccagcctgggcgacagtgcaagactctgtctccaaaaaaaaaaaaagaaaaaagaaaa

SEQ ID NO: 1703 - DNA, 176 bp, Homo sapiens
  source 1..176: mol_type = other DNA
cagggatggcaaatagccttcatttcactctgatggactgggaatagatgtctggaagcaccaatctgacatggattctaagaccaaatcctggcacagaggacaggaatgctgcactcattcataatgcctccttaaaagagcggtggcacaggtgttatatattccccattcct

SEQ ID NO: 1704 - DNA, 270 bp, Homo sapiens
  source 1..270: mol_type = other DNA
ccagcactttgtgaggtcaaggccagcagatgacttgaggtcaggattttgagaccagcctggccaacatggagaaaccacatctctactaaaaatacaaaaaaattagccaggcatggtggctggtgcctgtaatcccagctactggggaggctgaggcaggagaatcgcttgaacccaggaagtggtggttgcagtaaggtgagatcataccactgcactccagcctgggcaacagagcaatattacatctcaaaaacaaaaacaaaa

SEQ ID NO: 1705 - DNA, 303 bp, Homo sapiens
  source 1..303: mol_type = other DNA
ggctgggcgtgggggctcacgcctgtaatcccagcactttgggaggctgaggcaggcggatcacctgaggtcgggagttcaagaccaacctcaccaacatgaagaaacgctatctctactaaaaatacaaaactggccaggtgtggtggcgcatgcctgtaatcctagctactcgggaggctgaagcagaagaatcacttgaacccaagaggcagaatttgcggtgagccgagatcacaccattgcactccagcctgggcaacaagagtgaaactccatctcaaaaaaaaaaaaaaaaaaaaa

SEQ ID NO: 1706 - DNA, 53 bp, Homo sapiens
  source 1..53: mol_type = other DNA
cagctcgctcattcttaagatgtcagcttaaatgttatctcttcagaggcccc

SEQ ID NO: 1707 - DNA, 133 bp, Homo sapiens
  source 1..133: mol_type = other DNA
ggcagggagcggtggctcacgcctgtaatctcaacactttgagaggctgaggcaggcagatcacttgaggccaggagttagagactagcctggccaacatggtgaaccccatctctacaaaaaatacaaaaat

SEQ ID NO: 1708 - DNA, 337 bp, Homo sapiens
  source 1..337: mol_type = other DNA
taaggcacaaagtgacaacggtcagaactgctgtggaatgtcccttaggcaggttctacatcagagaggaatggcaagtctcataccatcagtttttcttctaagctgggatagacatggacagccctttctccacttgagcaccgtgtgaaggagttcacttaaatgccagaatcatcgtggtgtgagatgctcactccacggtacatgggcaggagctgagacccagaacagcagcttcaaccccacattccagccatcctccgtcaccccctgtgctcactcactgagtgaaacgttggacctaacagtctaaattgatattttcttctttctc

SEQ ID NO: 1709 - DNA, 163 bp, Homo sapiens
  source 1..163: mol_type = other DNA
ttgtcttaaagaaatggctaatcaatgagatcaatgctttctctgcagcaccttccaaacctttccttctgagcaccccgccattctactcggcgtgctgcggtgggtcctgtcggcgccctgcatcctccactgcttttccaagtaagtttttatccttcat

SEQ ID NO: 1710 - DNA, 276 bp, Homo sapiens
  source 1..276: mol_type = other DNA
gccagacacaatggctcacacctgtaatcccaacacattggaaggccaaggcaggtgatcatttgagctcaggagttacagaccagcctggacaacacaggggagaccccatctctacaaaaagtacaaaaattagccaggcatggtggtgtgcatctgtagtcccagctacttgggaggctgaggctggagatcacttgagtttgagaggttgaggcagtgaggcgagatcacgctgctgcactccaccctgggtgacagacaagcgagaccctg

SEQ ID NO: 1711 - DNA, 161 bp, Homo sapiens
  source 1..161: mol_type = other DNA
tatatctatgtgcatagaaaaaccctggaaggccatacaacaatatatatagagtgatcgtctctgcttgctgagctaacaggtgaacttttttctttttgctcattttattccatttgaaaaattgtattttctaacttttctaccaaacctatattagt

SEQ ID NO: 1712 - DNA, 49 bp, Homo sapiens
  source 1..49: mol_type = other DNA
tgcctggcacacagtagacactcaataaatatctgtcaaatgaaagaat

SEQ ID NO: 1713 - DNA, 138 bp, Homo sapiens
  source 1..138: mol_type = other DNA
tgtgactcagacacacctgggtttaagtcccagctgggagctcaggtaagtcaaatcgtcttctggggcctctgtttatcagtagaaggctccagaagtatacactgttgatggctccttcccgctctgatgcaccat

SEQ ID NO: 1714 - DNA, 54 bp, Homo sapiens
  source 1..54: mol_type = other DNA
agtgcctagcctgtgcccagcaaatagttggcactcaataaagatttgcagaat

SEQ ID NO: 1715 - DNA, 304 bp, Homo sapiens
  source 1..304: mol_type = other DNA
ggccagccatggtggctcacgtctgtaatcccaggactttgggaggctgaggcaggtggatcacctgaggtcaggagttcgagcccagcctgaccaatatgatgaaaccccgtctctactaaaaatacaaaaattagctgggcatggtggcatgcgcctgtaatcccagctactcaggaggctgagacagaagaatcgcttgaacctgtgaggcagaggttgcagtgagccaagatcgcgccattgcactccagcctggacaacaagagcaaaactgtctcaaaaaaaaaaaaaaaaaaaaaaa

SEQ ID NO: 1716 - DNA, 306 bp, Homo sapiens
  source 1..306: mol_type = other DNA
ggcttggtgcagtggcttacacctgtaatcccagcactttgggaggccgaggcaggtggatcacttgagctcaggagtttgagaccagcctgaccaacctggtgaaaccctgtctctactaaaaatacaaaatcagccaggtgtggtggcgcatgcctgtaatcccagctacttgggaggctgaagcacaattgcctgaaccagggaggcagaaattgcagtgagccaagatcgtgccattgcactccagcctgggcaacaagagtgaaacttcgtctcagaaaaaaaaaaaaaagaaagaaaaaa

SEQ ID NO: 1717 - DNA, 115 bp, Homo sapiens
  source 1..115: mol_type = other DNA
ggccaggtgcactgtctcacacctgtaatcccaacaatttaggaggtcaaggtgggagaatcacttgagcccaggagttcaagaccggcctaggcaacacagtgagaccctgtct

SEQ ID NO: 1718 - DNA, 296 bp, Homo sapiens
  source 1..296: mol_type = other DNA
gccaggcatggtggctcacacccataatcccagcactttgggtggctggagcaggcggatcacttgagctcaggagttcaagaccagcctgggcaacacagggaaaccccatctctacaaaaaaaaatacaaaaatcagctgggcatgatggcacatgcctgtggtctgagcttctcgggaggctaaggtaggaagaccgctttagcccgggaggtggaggttgcagtgagccatgatcttgccactacactccagcttgggtaacaaagtgagaccctgtctcaaaaaaaaaaaa

SEQ ID NO: 1719 - DNA, 296 bp, Homo sapiens
  source 1..296: mol_type = other DNA
ggccgggtgcagtggctcacgcctgtaatcccagcactttgggaggccgaggcgggtggatcacttgaggtcaggagttcgagaccagcctggccaataaggtgaaaccctgtctctactaaaaatacaaaaattagccgagcatggtggcctgtgcctgtaaacccagctactcaggaggttggggcagaattgcttgaacccagggggcagaggttgcagtgagccgagattgcacccctgcactccaggctgggcaacagtacgagactctgttccaaaaaaaataaaaaaga

SEQ ID NO: 1720 - DNA, 155 bp, Homo sapiens
  source 1..155: mol_type = other DNA
cacactttcttttccattggtttatttgtatattggtccacaacacattgaagcctcacagttccaagaattttttttttttcatatttgtggcaaactgaggtagagacaatgcttggcacagaataggtactagataaatattagtggaatga

SEQ ID NO: 1721 - DNA, 117 bp, Homo sapiens
  source 1..117: mol_type = other DNA
tgaccttgggcaagtcacttctttcaatgcctcagttccccatctgtcaaatggggttaataatactgacctacctcacaggggtgttgttgtgaggcattgtaaatcaaagttaat

SEQ ID NO: 1722 - DNA, 242 bp, Homo sapiens
  source 1..242: mol_type = other DNA
gccgggtgcggtggcttatgcttgtaatcccagcactttgggaggctgaggcacgtggatcacttgagctcacgagttggagaccagcctgggcaacacagggagactgtctctacaaaacattttttaaataataaaattagccagacaccgtggtgtgcgcctgtagtcccagctgcttgggaggctgaggcaggaggatcatttgagcccaggagattgaggctgcagtgagctgtaat

SEQ ID NO: 1723 - DNA, 303 bp, Homo sapiens
  source 1..303: mol_type = other DNA
gccgggtgctggctcacgcctgcaatcccagcactttgagtggccgaggcaggcggatcacaaggtcaggagttcaagaccagcacggccaagatggtgaaccctgtctctactaaaaatacaaaaattagccgggcatggtggcaggcgcctataatcccagctgctcaggaggctgaggcagagaactgcttgaacccgggaggcggaggttgcagtgagccaagatcacgccactgcactccagcctgggcaaaagagcaagtttccatctcaaaaaaaaaaaaaaaaaaaaaaaaaaaa

SEQ ID NO: 1724 - DNA, 130 bp, Homo sapiens
  source 1..130: mol_type = other DNA
ggccaggcacagtggctaccgcctgtaatcccagcactttgggaggctgaggcaggagaattgcttgaagccagaagtttgagaccagcctgggcaatgtagtgagaccccctgtctctaaaaaatataa

SEQ ID NO: 1725 - DNA, 142 bp, Homo sapiens
  source 1..142: mol_type = other DNA
gctgtgtgatactgagcatctcactgtctctctcaacctattttctcatctaccaagtggggctaagacccaccaggtccacctcagagttgtggaggatcaaaggggataatgtgtgaggaagcatgttaaaagctgaaag

SEQ ID NO: 1726 - DNA, 132 bp, Homo sapiens
  source 1..132: mol_type = other DNA
agaaaaaggagaaaagggaaaagcagaaaggaaaagaaggaaaagagaggaagggagaagggagaggaatgaattgaggaagtgaacgaaggcaaggaggtaggaagagagggaggaggaaaggaaggagag

SEQ ID NO: 1727 - DNA, 107 bp, Homo sapiens
  source 1..107: mol_type = other DNA
catggcatcacctttctcacacaggctcagtaccgacacacctgagctagatgcttccaccaaggaccgaagtacccctgaggacagaatcccatcatgtcagcctt

SEQ ID NO: 1728 - DNA, 311 bp, Homo sapiens
  source 1..311: mol_type = other DNA
gctgggcgcagtggctcacgcttgtaatcccagcactttgggaagccgaggtgggcggatcacctgaggtcgggagttcaagaccagcctgaccaacatggagaaaccccgtgtctactaaaaatacagaattagccaggcatggtggcgtatgcctgtaatcccagctacttaggaggctgaggcaggagaatctcttgaaaccgggaggcggaggttgaggtgagccgaaattgcaccattgcactccagcctgggcaataagagcgaaactccatctcaaaaaaaaaagaaagaaagaaagaaagaaa

SEQ ID NO: 1729 - DNA, 180 bp, Homo sapiens
  source 1..180: mol_type = other DNA
ggggaagaaggaatgaggagttaatgtttaatgggaacagtttctcggtttgggcagacaaaagttctggagatggatggttgcacaataatgtaaacatatctactgccactaaaccatatacttaaaaatgattaaaatggtaaattttatgttatgtatattttacactacttaaaa

SEQ ID NO: 1730 - DNA, 300 bp, Homo sapiens
  source 1..300: mol_type = other DNA
gccaagtacagtggctcatacctgtaatcccagcactcttggaggccaaggcaggcagatcacttgagcacaggagttcgagaccagcctgggcaacatggcaagaccccgtctctacaaaaaaaatataaaaaagtagctgggtgtggtggtgtgcatctgtgtgaggctgagatgggaggatcacctaagcctgggagatccaagctgtagtgagcctcagtcatcacaccactgcactccagcctgggcaacggagtgaggcctgtctcaaaaaaaaaaaaaaaaaaaaaaaaaaga

SEQ ID NO: 1731 - DNA, 306 bp, Homo sapiens
  source 1..306: mol_type = other DNA
gccgggcacggtggttcatgcctgtagtcccagcactttgggaggctgaggcgggtggattacctgaagttgggagtttgagaccagcctgaccaacatggagaaaccccgtctctactaaaaatacaaaattagctgggcgtggtggcacatgcctgtaatcccaactactcgggaagctgaggcaggagaatcacttgaacccgggaggtggagcttgcggtgagccgagatcgcgccattgcactccagcctgggcaacaagagtgaaactccatctcaaaaaaaaaaagaaaaaaaaaaaga

SEQ ID NO: 1732 - DNA, 299 bp, Homo sapiens
  source 1..299: mol_type = other DNA
ctgggaacagtggctcacgcctgtaatcccagcactctgggaggccgaggtggacagatcacttgaggtcaggagttcgagaccagcctgaccaacatggagaaaccccgtctctactaaaaatacaaaattagctgggcatggtggtgcagatctgtaatcccagctactggggaggctgaggcaggagagtcacttgaacccggaaggcggaggttgcagtgagccgagatcacaccattgcactccagcctggacaacaagagagaaactccatctcaaaaaaaaaaaaaaaaaaa

SEQ ID NO: 1733 - DNA, 281 bp, Homo sapiens
  source 1..281: mol_type = other DNA
gccaagcacagtggctcatgcctataatcccagcactttgggaggccaaggcgtgaggatcacttgagcccagttcaagaccagcctgggcaatatagcaagaccctgtctttaaaaaaaaaaaatagggcatggtggcgcatgccatggtgctagctacccaggaggctgaggtaggaggattgcttgaacccaggaggttgaggctgcagtgagctgtgattgcaccattgcactctagcctgggcaacagagtgagaccctgtttaaaaaaaaaaaaa

SEQ ID NO: 1734 - DNA, 296 bp, Homo sapiens
  source 1..296: mol_type = other DNA
ggcggggcgtggtggctcacgcctataatcccagcacgttgggaggccaacgcgggtggatcacctgaggtcaggagttcgagaccagcctgactaacatggtgaaaccctgtctctactaaaaatacaaaattagtcaggcgtggtggtgcacacctgtaatcccagctacttgggagactgaggcaggaggatcgcttgaacccgggaggcagaggttgcggtgagccgagatcatgccattgcactccagcctgggcaacagagcaagactctgtgtcaaaaaaaaaaaaaga

SEQ ID NO: 1735 - DNA, 310 bp, Homo sapiens
  source 1..310: mol_type = other DNA
ggctgggcacggtggctcacgcctgtaatcccagcactttgggaggccaaggtgggcgtatcacctgaggtcaggagttcgagaccagcctggccaacatggtgaaacctcgtctctactaaaagtacaaaaataagccgggggtggtggcacacgcctgtaatctcagctacttgggaggctgagataggagaatcacttcaactcaggaggcggaggttgcagtgagctgagatcataccattgcactccagcctgggtgatagagcgagactccgtctcaaaaaaaaaaaaaaagaaaaaagaagaa

SEQ ID NO: 1736 - DNA, 259 bp, Homo sapiens
  source 1..259: mol_type = other DNA
ctttgggaggtaggggtgggaggattgcttgagtgcaagagttcaagaccagcctgggcaatatactgagaccccatctctataaaaatattaacaaactagccaagcatggaggtgcgtgcctgtagtgtcagctagttgggaagctgagatgggaggatcacttgagcccaggaggttgaagctgcagtgagctgtgatcatgccattgcaatccagcctgggcaacacagcaagccctggtctcaaaaaaaaagaa

SEQ ID NO: 1737 - DNA, 303 bp, Homo sapiens
  source 1..303: mol_type = other DNA
ctgggcgcggtggctcacgcctgtaatcccagcactttgggaggccgaggcgggcggatcacgaggtcaagagtttgagaccagcctggccaacatggtgaaaccccgtctctactaagaatacaaaaattagccaggcgtggtggctcgtgcctgtaagctactcgcgaagctgaggcgggagaatccttgaacccgggaggcagaggttgcagtgagccgagatcacagccactgcactccagcctgggcaacagagcaagactccgtctcgaaggaaaaaaaaaaaaaagaaaagaaaaa

SEQ ID NO: 1738 - DNA, 302 bp, Homo sapiens
  source 1..302: mol_type = other DNA
gcacagtgggccatgcctgcaatcccagcactttgggaggcaaggcgggtggatcacttgagcccaggagtttgagaccaccctgggcaacatggcgaaaccctgtctctactgaaaatacaaaaattagccgggtgtggtggcgcatgcctctagtcccagctacttggggagctgaggcaggaagatcatctgggccttcagaggttgaggctgcagtgagctgtgatcacaccactgcactccagcctggatgacagagtgagaccctgtctcaaaaaaaaagaaaaaaagaaaaaaaa

SEQ ID NO: 1739 - DNA, 138 bp, Homo sapiens
  source 1..138: mol_type = other DNA
tttgtgattctcattttctcaccattaaattaccttggagggtagggctgtggtttactcctgtctaaacccctgaagcctaacacagttcctggcacacaacaggtgttcaacagatattgtgctcattcaataaat

SEQ ID NO: 1740 - DNA, 99 bp, Homo sapiens
  source 1..99: mol_type = other DNA
caaccacacaagtttgttgtgagtcataaatggataatgaatataaatgcgcattgaaaataaacataaaatgttacccacatttcttgtgttgttgtt

SEQ ID NO: 1741 - DNA, 389 bp, Homo sapiens
  source 1..389: mol_type = other DNA
tatcattttaattgctatgtgtatcttccaggtctgcctttccaaattggagctgtctctgaacttcagcttcctgaatccaacttcttgcagaacacctcctcttgactgctctaagcaccttaaaaataacaccttcaggatgtagctcttctttactaaacttgtatctgagtctccacttttgataggtggtatctatctagtcacctaaggcagaagcctgagagtttcctagaaaccccccatatccaatgagtcaccagggctgaccaactttacctcctaagcatttgtcaaatctgtcaccatccctccatccctactccactgcccttatgtgggcccacagtagctcttacttgaccatgacaatagtctactgactg

SEQ ID NO: 1742 - DNA, 542 bp, Homo sapiens
  source 1..542: mol_type = other DNA
tgacagtttcttacaaagttaaacatacacttaccgtatgatccagcaatcctactcctgggtatttactcaagtaaaacaaaaaactatcttcacagaaaaacctgtgcacaaatgtttatagcacctttattcataatcagaaacaaccccactggaaaatggataaacaaacagtagtacatccacatgatggaatacttctcagcaataaaaagggatgagcagcgcgctggtaaacccaacagagatctcatatgcattctgctaagagaaagaagccagactgaaaggctaaatattgtatgactccacttacagcattctggaaaaggcaaaactatagtgatggagaatagattcatggttaccagaggttaaggattcagggaggctttgactccaaaggggtcgcaccccagataattttgggacggactgaggaagaaactgttctgtgcctttattgtggtggtagtaacatgattctgcttgtgaaaattcttagaattgtatgtcaaaagagtatattttattgtatg

SEQ ID NO: 1743 - DNA, 223 bp, Homo sapiens
  source 1..223: mol_type = other DNA
gcaatgcgtaatggcacatgcttgatatcacacaagtctggggtcaagtcctagccttgtcatttactagtcaagtttccaagtctcagtttcctcatctgtactatggaataataacatctacttcataagagttataatgaggatcaatgaaatgatgtaggtaagcaccagtcacagagcctggaatatgataaagttctcaggatgaaagttgttgtta

SEQ ID NO: 1744 - DNA, 102 bp, Homo sapiens
  source 1..102: mol_type = other DNA
atcagatttcaagctccttgagagcaggtattttaattctataaagcctctacgtggccttggacatgggtaggtgcttaattacccaagatgctccttgaa

SEQ ID NO: 1745 - DNA, 313 bp, Homo sapiens
  source 1..313: mol_type = other DNA
ggtggcttacacctgtaatcccaacactttgggaagccagggcatgaggattgtttgagcccaggagtttgtaacttgtgaccatcctgggcaacatagtgagaccctgtctctacaaaaaaaaaaaaaaaaaaaaaaaaaaaaaaagccaagcatggtggtgcacacctgtggtctcagcttctcaggaggctgaggcagaaggatcacttgagcccaggaggtggcggttgcagtgagccgtgattgtaccactgcactccagcctgggtgacagagcaagaccctgtctcaaaaacaacaacaacaaaaa

SEQ ID NO: 1746 - DNA, 298 bp, Homo sapiens
  source 1..298: mol_type = other DNA
gccaggcgcggtggctcacgcctgtaatcccagcactttggaaggccgaggtgggtggatcacgaggtcaggagttcaagaccagcctggccaagatggtgaaaccccgtctctactaaaaatacaaaaaaattagccgggcgtggtggcgggcgcctgtaatcccagctactcgggaggctgaggcaaagacttgcttgaacccgggaggcggagattgcaggtagccgagatcgcgccactgcactccagcctgggcgacagagcgagactctgtctcaaaaaaaaaaaaaaaaaa

SEQ ID NO: 1747 - DNA, 230 bp, Homo sapiens
  source 1..230: mol_type = other DNA
ggccacctttgcaaccacatggaggtttgtctgatattgaagctaaagaagctaagctggaagacagagagaccaagtcctgatgacattgtttgaacccagagatccagacatgcctgaaaactagttttaccactggacttatccgttgaatgagccaataaactctcttttatacttaaccttgggttttacctggatttttgtcattgacagctcaaaatattcta

SEQ ID NO: 1748 - DNA, 111 bp, Homo sapiens
  source 1..111: mol_type = other DNA
tttggctactcacattctctgttttccttgacagccaaacttcttgaaagaattgtcttcacatgctgtgtccacttcatcctgtcttttcaattcactgtaaacagattt

SEQ ID NO: 1749 - DNA, 6479 bp, Homo sapiens
  source 1..6479: mol_type = other DNA
aattttagctccagatcgactgcaagaacaaaccagcaatactgagaggacccacagaccctctgaaggaagcgactgctcctacagtgcccaggagacaccccaaatactgtgagtgcccaactgcagaagtgggaaagggagaccctcctctcccacacacacccccccactggagaaactgaaggtctgtttgtgggagaagtttccgaccttacctggagctgagttaatttagagagccgagcgaaatacaggggtagagcaagcagcaggaaggcccagggagctcgctgggtccccaagcagcccattcctgcctgtcaccacagagatccattgcaagggcagccagaagagcagcgggtaaaactccacagggagaaggacatctctagctgaactttgtaactatttcaatggggcaagaagcctcccggccagaacttgggagagggcacaaatcccatgtgcagaatccacagaggggaagaaccaagctcttttctttcacagctgggaggtgggtagcctggggcaagttttcaagcctgtctcacccaccacctggaagcagacttggggctgtggtggggggcatggtgggagtgagactggcccttcggcttgtgtgggagctgggtgaggcctgtgactgccggctttcccctacttccctgacaacctgcatgactccccagaggcagtcataatcctcctagggacacaactccagtgacctgggaatctcaccctcatctcccacaacagtcacagcaagacctgcccaaggagagtctgagctcagacatgtctatccctgccccgacctgatgttccttccctacccaccctggtatctgaacaaaaagggcatacaatcttgggagttctagggccccactcaccacaagttcttctccatactaccacaactgatgctctctggaaagcgctacctcctggcaggaggccagccagcacaaaaatagagccttcaaccaccaaagctaagaaccctcatggagtccattgcaccccccctgccacctccactggaacaggtgctggtatccacagccgagagacccatagacggttcacatcacaggattctgtgcaggcaacccccagtaccagcatggagctgggtagactcactgggtggctagacccagaagagagacaacaatcacagcagtttggcttacaggaagccacatccatcggaaaagggggagggtatacatcaagggaacaccctgtgggacaaaggaacctgaacaatggccttcagccctagaccttccctttgacagagactacccaaatgagaaggaaccagaaaactaaccctggtaatatgacaaaacaaaagctctttaacacccacaaaaaaatcacactagttcaccagcaatggattcaaaccaagaagaaatccctgatttacctgaaaaagaattcaggaggttagttattaagctaatcagggaggcaccagagaaaggcaaagcccagtgcaaggaaatccaaaaaatgatataagaagtgaagggagaaatattcaaggaaatggagagcttaaagaaaaaagaataaaaaattcaggaaactttggacacacttttagaaatgcaaaatgctctggaaaatctcagcaatagaattgaacaagtagaagaaagaaattcagagcttgaagacaaggtcttcaaattaacccaatccaaaaaagacaaagaaaaaagaataagaaaatatgaacaaagcttccaagaagtctaggattatgttaagtgaccaaaactaagaataatcagtgttcctgaggaagaagagaattctaaaagcttggaagacatatatgggggaaataatcaaggaaaacttctctggccttgcgagagacctagacattcaaatacaagaagcacaaagaacacctgggaaattcatcacaaaaagatcattgtttaagtacattgtcactaggttatccaaagttaagatgaaggaaagaatcttaagagctgtgagacagaagcaccaggtaacctataaaggaaaacctatcagattaacaacagatttctcagcagaaaccctacaagccagaagggattggggccctatcttcagcctcctcaaacaaaacaattatcagccaaggattttgtatccagtgaaacaaagcatcatatatgaaggaaagatacagtcttttttcagacaaataagtgctgggagaattcaccactaccaagccaccaccacaagaactgcttaaaaggagctctaaatcttgaaacaaatcctggaaatgcaacacatcaaaacagaacctctttaaagcataaatcacacaggatctgtaaaacgaaaatacaaattaaaaagcaaaagtaaaaaaccaaaatacagaggcaacaaagagcatgatgaatgcaatgatacctcacatttcaattataacattgaatgtaaatggcctaaatgctccacctaaaagaaatagaaccacagaatggataaaaactcaccaaccaactatctgctgccttcaggagactcacctaacacataagaactcacataaacttaaactaaaggggtggaataaagcatttgatgcaaacggacaccaaaagtgagcaggggtggctattcttacatcagacaaaacaaactttaaaacaacagcagttaaaagagacaaagagggacattacataatggtaaaaggccatgtccaacaggaaaatattactgtcctaaacatatatgcatctaacactggagcttccaaatttataaaacaattactaatagacctaagaaatgagagacagcaacacaacaagagtgggggacttcagtactccactgacagcattagacaggtcatcaagacagaaagtcaacaaagaaacaagggatttaaactataacttggaacaaatggacttaaccgatatatacagaacatttcatgcaacaaccacagaatacacgttctattcaacagtgcatggaactttctccaaggtagaccttaggataggccataaaatgagcctcaataaatttaagaaaatcaaaattatatcaagcactctctctgaccacagtggaataaaactggaaatcaactccaaaaggaaccatcaaaaccatgcaaatacatggaaattaaataacttgctcctgaatgagtattgggtcaagaacgaaatcaagatggaaattaaaaaattctttgaactgaatgataataatgacacaacctaccaaacccctgggataaagcaaaggtggtgctaggaggaaggttcatagccctaaatgctgatatcaaaaagactaaaagagcacaaactgacattctaaggtcacacctcaaggaactagagaaacaagaacaaaccaaacccaaacccagtagaagaaagaagtaaccaagatcagagcagaactaaaggaaattgaaacagcaataacaacaacaaaaatacaaaagataaatgaaacaaaaagctggttctttgataagataagtaaaattgatggactattagcaagattaactgagaaaataagaaagaaaatccaaataatttcactaataaacaaaacaggagatattacaactgacaccactgaaatacaaaggatcattcaaagctactgtgaacacctttatgcacataaactggaaaacctagaagagatggataaattcttggaaaaacacaatcctcctagcttaaaccaggaagaattagataccctgaacagactaataacaagcagcgagattgaaatggtaattaaaaaattaccaacaaaaaaagtcccggaccagatggattcacagcagaattctaccagacattcaaagaagaattgataccaatcgttttgacactattccacaagatagagaaagaagaaacccttcctaattcattctatgaagccagcatcaccctaataccaaaatcagggcaggacataaccataaaagaaaactacagaccaatatccttgaagaacatagatgctaaaatcattaacaaaatactagctaactgaattcaacaacatatcaaaaagataatccaccatgattaagtgggcttcataccaaggatgcagggatggtttaacatacacagttcaataaatgtgatacaccacacaaacaattaaaaacaaaaatcatgtgatcatctcaatagatgcagaaaaagcattcaacaaaatccagcattgctttatgattaaaactctcagcaaaatgggcagacaagggacaggtatgtcccttgtaataaaagccatctatgatagacccacagccaacataatactgagtggggaaaagttgaaagcattccctctgagaactggaacaagacaaggatgcccactctcaccactcctcttcaacatagtactggaagtccaagccagagcaatcagacaagagaaagaaataaagggcatccaaattggtaaagggaaagtcaaactgtcactgtttgctggtgatatgattgtttaccttgaaaactccaaagactcctccagaaagctcttagaacagataaaagaattcagcaaagtttctggatacaagattaatgtacacaaatcagtagctcttctatataccaacagcaaccaagcagaggatgaagtaaagaactcagccccttttacaatagctggggaaaaaaaaaaaaaaaaaggaatatatctaaccaaggagtcaaaatagctctacagggaaactacaaaacactgctgaaagaaatcatagatgatacaaacaaatggaaacatcccatgctcacgaatgggtagaatcaatattgtgaacatgaccgtactgccaaaagcaatctacaaattcaatgcaatccccatcaaaataccaccatcattcttcacagaattaggaaaagcaattctaaaattcatatggaaccaaaaaagagcctgcatagccaaagcaagactaagcaaaaagaacaaatctggaggcatcacactacctgatttcaaactatattataaggccatagtcaccaaaacagcatggtactggtactggtataaataggcacatagaccaatagaatagaatagagaacctagaaataaacccaaatacttacagccaactgatctttgacaaagcaaacaacattaagtggggaaaggacacccttttcaacaaatggtgctggcagaattggatagccacatgtaggagaatgaagctggatcctcatctctcaccttataccaaaatcaactcaagatggatgaaggacttaaacctaagacctgaaactattaaaattctagaagataacattggaaaaattctagacattggcttaggcaaggatttcacgaccaagaacccaaaaacaaatacgacaaaaacaaagataaatagctgggacctaattaaactaaagagcttttgcatggcaaaaggaacagtcagcagactaaacacaacctacagagtgggagaaaatattcacagtctatacatctgacaaaggactaatatccagaatctacaatgaacacaaacaaatcagtaagaagaaaacaatcccatcaaaaagtgggctaaggacatgaatagaaaattctcaaaagaagatatacaaattgccaacaaacatatgaaaaaacgctcaacatcattaatgatcagggaaatgcaaatcaaaaccacaatgcagtaccaccatactcctgcaagaatggccataataaaaaagtcaaataacagtagatgttggcgtggatgcggtgatcagggaacacttctacactgctggtgggaatgtaaagtaaagtatacagccactatggaaaacagtgtggatatttcttaaagaactaaaagtagaacttccatttgatccagcaatcccactactgggtatctacccagaggaaaagaagtcattattcaaaaaagacacttgcacacatatgtttataggagcacaattcacaattgcaaaattgtggaaccaagccaaatgcccatcaatcaacgagtggataaagaaactgttatatatatatatgatggaatactactcagccataaaaaggaatgaattatcagcatgtgcagtgacctggatgagactggagactattattctaagtgaagtaactcaggaatggaaacccaaacatcatatgttctcactgatatgtgggagctaagctatgaggacacaaaggcataagaataattcaatggacttcggggacttgtggggaagaagaggaggagggccgaggaataaaagactaaaaatatggtgcagtgtatactgttcgggagatgggtgtgccaaaatctcacaaatcaccactaaagaacttactcatgtaaccaaataccacctgtaccccaataattatggaaaaaaaaa

SEQ ID NO: 1750 - DNA, 7520 bp, Homo sapiens
  source 1..7520: mol_type = other DNA
tctggtgcccaacgtggaggcttttctctagggtgaaggtacgctcgagcgtggtcattgaggacaagtcgacgagagatcccgaggacgtctacagtcagccttacggtaagcttgtgctctcggaagaagctagggtgataatggggcaaactaaaagtaaaattaaaagtaaatatgcctcttatctcagctttattaaaattcttttaaaaagagggggagttaaagtatctacaaaaaatctaatcaagctatttcaaataatagaacaattttgcccatggtttccagaacaaggaactttagatctaaaagattggaaaagaattggtaaggaactaaaacaagcaggtaggaagggtaatatcattccacttacagtatggaatgattgggccattattaaagcagctttagaaccatttcaaacagaagaagatagcatttcagtttctgatgcccctggaagctgtataatagattgtaatgaaaacacaaggaaaaaatcccagaaagaaacggaaggtttacattgcgaatatgcagcagagccggtaatggctcagtcaacgcaaaatgttgactataatcaattacaggaggtgatatatcctgaaacgttaaaattagaaggaaaaggtccagaattagtggggccatcagagtctaaaccacgaggcacaagtcctcttccagcaggtcaggtgcccgtaacattacaacctcaaacgcaggttaaagaaaataagacccaaccaccagtagcttatcaatactggccgccggctgaacttcagtatcggccacccccagaaagtcagtatggatatccaggaatgcccccagcaccacagggcagggcgccataccctcagccgcccactaggagacttaatcctacggcaccacctagtagacagggtagtgaattacatgaaattattgataaatcaagaaaggaaggagatactgaggcatggcaattcccagtaatgttagaaccgatgccacctggagaaggagcccaagagggagagcctcccacagttgaggccagatacaagtctttttcaataaaaatgctaaaagatatgaaagaaggagtaaaacagtatggacccaactccccttatatgaggacattattagattccattgctcatggacatagactcattccttatgattgggagattctggcaaaatcgtctctcttaccctctcaatttttacaatttaagacttggtggattgatggggtacaagaacaggtccaaagaaatagggctgccaatcctccagttaacatagatgcagatcaactattaggaataggtcaaaattggagtactattagtcaacaagcattaatgcaaaatgaggccattgagcaagttagagctatctgccttagagcctgggaaaaaatccaagacccaggaagtacctgcccctcatttaatacagtaagacaaagttcaaaagagccctatcctgattttgtggcaaggctccaagatgttgctcaaaagtcaattgccgatgaaaaagcccgtaaggtcatagtggagttgatggcatatgaaaacgccaatcctgagtgtcaatcagccattaagccattaaaaggaaaggttcctgcaggatcagatgtaatctcagaatatgtaaaagcctgtgatggaatcggaggagctatgcataaagctatgcttatggctcaagcaataacaggagttgttttaggaggacaagttagaacatttggaggaaaatgttacaattgtggtcaaattggtcacttaaaaaagaattgcccagtcttaaacaaacagaatataactattcaagcaactacaacaggtagagagccacctgacttatgtccaagatgtaaaaaaggaaaacattgggctagtcaatgtcgttctaaatttgataaaaatgggcaaccattgtcgggaaacgagcaaaggggccagcctcaggccccacaacaaactggggcattcccaattcagccatttgttcctcagggttttcagggacaacaacccccactgtcccaagtgtttcagggaataagccagttaccacaatacaacaattgtcccccaccacaagcggcagtgcagcagtagatttatgtactatacaagcagtctctctgcttccaggggagcccccacaaaaaatccccacaggggtatatggccccctgcctgaggggactgtaggactaatcttgggaagatcaagtctaaatctaaaaggagttcaaattcatactagtgtggttgattcagactataaaggcgaaattcaattggttattagctcttcaattccttggagtgccagtccaggagacaggattgctcaattattactcctgccatatattaagggtggaaatagtgaaataaaaataataggagggcttggaagcactgatccaacaggaaaggctgcatattgggcaagtcaggtctcagagaacagacctgtgtgtaaggccattattcaaggaaaacagtttgaagggttggtagacactggagcagatgtctctatcattgctttaaatcagtggccaaaaaattggcctaaacaaaaggctgttacaggacttgtcggcataggcacagcctcagaagtgtatcaaagtactgagattttacattgcttagggccagataatcaagaaagtactgttcagccaatgattacttcaattcctcttaatctgtggggtcgagatttattacaacaatggggtgcggaaatcaccatgcccactccattatatagccccacgagtcaaaaaatcatgaccaagatgggatatataccaggaaagggactagggaaaaatgaagatggcattaaagttccagttgaggctaaaataaatcaaaaaagagaaggaatagggtatcctttttaggggcggccactctagagcctcctaaacccataccattaacttggaaaacagaaaaactggtgtgggtaaatcagtggccgctaccaaaacaaaaactggaggctttacatttattagcaaatgaacagttagaaaagggtcatattgagccttcgttctcaccttggaattttcctgtgtttgtaattcagaagaaatcaggcaaatggcgtatgttaactgacttaagggctgtaaacgccataattcaacccatggggcctctccaacctgggttgccctctccggccatgatcccaaaagattggcctttaattataattgatctaaaggattgcttttttaccatccctctggcagagcaggattgtgaaaaatttgcctttactataccagccataaataataaagaaccagccaccaggtttcagtggaaagtgttacctcagggaatgcttaatagtccaactatttgtcagacttttgtaggtcgagctcttcaaccagttagagaaaagttttcagactgttatattattcattatattgatgatattttatgtgctgcagaaacgaaagataaattaattgactgttatacatttctgcaagcagaggttgccaatgcaggactggcaatagcatctgataagatccaaacctctactccttttcattatttagggatacagatagaaaatagaaaaattagccacaaaaaatagaaataagaaaagacacattaaaaacactaaatgattttcaaaaattactaggagatattaattggattcggccaactctaggcattcctacttatgccatgtcaaatttgttctctatcttaagaggagactcagacttaaatagttaaccccagaggcaacaaaagaaattaaattagtggaagaaaaaattcagtcagcgcaaataaatagaatagatcccttagccccatccaacttttgatttttgccactgcacattctccaacaggcatcattattcaaaatactgatcttgtggagtggtcattccttcctcacagtacagttaagacttttacattgtacttggatcaaatagctacattaattggtcagacaagattacgaataataaaattatgtggaaatgacccagacaaaatagttgtccctttaaccaaggaacaagttagacaagcctttatcaattctggtgcatggcagattggtcttgctaattttgtgggaattattgataatcattacccaaaaacaaagatcttccagttcttaaaattgactacttggattctacctaaaattaccagacgtgaacctttagaaaatgctctaacagtatttactgatggttccagcaatggaaaagcagcttacacagggccgaaagaacgagtaatcaaaactccatatcaatcggctcaaagagcagagttggttgcagtcattacagtgttacaagattttgaccaacctatcagtattatatcagattctgcatatgtagtacaagctacaagggatgttgagacagctctaattaaatatagcatggatgatcagttaaaccagctattcaatttattacaacaaactgtaagaaaaagaaatttcccattttatattactcatattcgagcacacactaatttaccagggcctttgactaaagcaaatgaacaagttgacttactggcatcatctgcactcataaaagcacaagaacttcatgctttgactcatgtaaatgcagcaggattaaaaaacaaatttgatgtcacatggaaacaggcaaaagatattgtacaacattgcacccagtgtcaagtcttacacctgcccactcaagaggcaggagttaatcccagaggtctgtgtcctaatgcgttatggcaaatggatgtcacgcatgtaccttcatttggaagattatcatatgttcacgtaacagttgatacttatttacatttcatatgggcaacttgccaaacaggagaaagtacttcccatgttaaaaaacatttattgtcttgttttgctgtaatgggagttccagaaaaaatcaaaactgacaatggaccaggatattgtagtaaagctttccaaaaattcttaagtcagtggaaaatttcacatacaacaggaattccttataattcccaaggacaggccatagttgaaagaactaatagaacactcaaaacccaattagttaaacaaaaagaagggggagacagtaaggagtgtaccactcctcagatgcaacttaatctagcactctatactttaaattttttaaacatttatggaaatcagactactacttctgcagaacaacatcttactggtaaaaagaacagcccacatgaaggaaaactaatttggtggaaagataataaaaataagacatgggaaatagggaaggtgataacgtgggggagaggttttgcttgtgtttcaccaggagaaaatcagcttcctgtttggatacccactagacatttgaagttctacaatgcacccatcggagatgcaaagaaaagcacctccgcggagacggagacaccgcaatcgagcaccgttgactcacaagatgaacaaaatggtgacatcagaacagatgaagttgccatccaccaagaaggcagagccgccgacttgggcacaactaaagaagctgacgcagttagctacaaaatatctagagaacacaaaggtgacacaaaccccagagagtatgctgcttgcagccttgatgattgtatcaatggtggtaagtctccctatgcctgcaggagcagctgcagctaactataccaactgggcctatgtgcctttcccgcccttaattcgggcagtcacatggatggataatcctatagaagtatatgttaatgatagtgtatgggtacatggccccatagatgatcgctgccctgccaaacctgaggaagaagggatgatgataaatatctccattgggtatcattatcctcctatttgcctagggagagcaccaggatgtttaatgcctgcagtccaaaattggttggtagaagtacctactgtcagtcccatcagtagattcacttataacatggtaagcgggatgtcactcaggccacgggtaaattatttacaagacttttcttatcaaagatcattaaaatttagacctaaagggaaaccttgccccaaggaaattcccaaagaatcaaaaaatacagaagttttagtttgggaagaatgtgtggccaatagtgtggtgatattacaaaacaatgaatttggaactattatagattgggcacctcgaggtcaattctaccacaattgctcaggacaaactcagtcgtgtccaagtgcacaagtgagtccagctgttgatagtgacttaacagaaagtttagacaaacataagcataaaaaattgcagtctttctacccttgggaatggggagaaaaaggaatctctaccccaagaccaaaaataataagtcctgtttctggtcctgaacatccagaattatggaggcttactgtggcctcacaccacattagaatttggtctggaaatcaaactttagaaacaagagatcgtaagccattttatactgttgacctaaattccagtctaacagttcctttacaaagttgcgtaaagcccccttatatgctagttgtaggaaatatagttattaaaccagactctcaaactataacctgtgaaaattgtagattgcttacttgcattgattcaacttttaattggcaacaccgtattctgctggtgagagcaagagagggcgtgtggatccctgtgtccatggaccgaccgtgggaggcctcgccatccatccatattttgactgaagtattaaaaggtgttttaaatagatccaaaagattcatttttactttaattgcagtgattatgggattaattgcagtcacagctatggctgctgtagcaggagttgcattgcactcttttgttcagtcagtaaactttgttaatgattggcaaaaaaattctacaagattgtggaattcacaatctagtattgatcaaaaattggcaaatcaaattaatgatcttagacaaactgtcatttggatgggagacaggctcatgagcttagaacatcgtttccagttacagtgtgactggaatacgtcagatttttgtattacaccccaaatttataatgagtctgagcatcactgggacatggttagacgccatctacagggaagagaagataatctcactttagacatttccaaattaaaagaacaaattttcgaagcatcaaaagcccatttaaatttggtgccaggaactgaggcaattgcaggagttgctgatggcctcgcaaatcttaaccctgtcacttgggttaagaccattggaagtactacgattataaatctcatattaatccttgtgtgcctgttttgtctgttgttagtctgcaggtgtacccaacagctccgaagagacagcgaccatcgagaacgggccatgatgacgatggtggttttgtcgaaaagaaaagggggaa

SEQ ID NO: 1751 - DNA, 474 bp, Homo sapiens
  source 1..474: mol_type = other DNA
catcatggcatggtgtccagttcccctccctttgagtgtgagctgcccttagtgatcttctggatcagaagaatgtagcagaagtgactgggattgctgaaactcactcataagaaggcttttcatttctgcccaggcctttaagaatactcactattggagcactctctctaagaacccacatgcagaggccacatagaggagcttcagttgacagctctggctaagctccaacccaatagccagcagcagctgccaggcttgtgaatgacatcttggacatccagctcagtcaagtcttcagatgactccagtctcagctgccatctgactgcaactgcatgagagattccaagtaagaattgtcccagttgagcccagtcaacatgcagaagttgggagatgataaaaaattattgttttgagacactaaattttagagtatttaattttgcagtaatagacacctgaaac

SEQ ID NO: 1752 - DNA, 1600 bp, Homo sapiens
  source 1..1600: mol_type = other DNA
tctggttttcattttccaacgtaaggagcttgaaaattgacacttcaaactaacaagtaaaacgttgaacaaactgaaaaatcaacaactcttcttagatccataagagaaatgaggtcacagggcaaactgctgttcctcaaaattggagagacaagagaggcagaagcagagaatcacaccataccttaaaagaaacctctactagtaacatcgctggtgtaggaaaacttgaactgtaattgacaaattgctggaggttaggagtggacaaatctgagttaaaaattcccagggaatgcagtcatacaagggaaccaacaaatgtgagttttaccttcaatagcttgatcaggtctttataataaatatcagaaaaaaaataccctcatgcttctagcagaggaaagggtaaaggaaccattctgatatatgccagagcattccatccttaacaaggtttgccttcagaagaaactaccttaccagagcctaacctactgggattatatcagagactgatctgagtgaaagaaaatggctcacttcagggcagcgtacccatattgtcccagcgaatggggaaggaaaaaaaccctgagaaacacttacgaaattcacagttcagaagtagaggcacaataaaagattaagatctaatcataggactatagatttcttcctctctctccacatcacattactaaaggcttatttacagcatttctattcacccagtacattacatctggctatcaaaaaaaaaaaaaaaaaaaatgaaggcatgctaaaaggcaaaaaccgcagttcaaagagacagagccagcataacaagcagacatggcagggacattgaaattatctaaaagggaatttaaaacaacttattattagtatgctaagggctgtaatggataaagtagacagcatgccataacagataggcaatttaagcaaagagatggaaatctgagaaagaagcaaaacaaaaagttagagataagaaaaaccataaaagaaagaaaaaatgtctttgatgagattattaatagactaaatgtatctgaagaaagaatctctgagcttgaggatatatcactaggaacttccaaaacagaaaagaaaagagaacaaaggctcaagtaaccagcacagaatacccaaatatcatgagacaactccaaaatttataacttaagcagaatagaaataaccaaaagagaagaacttaacaaataatcattatggaaacaataacaactgaaaatttccctaaattaatgtcagacagaaaataacagatccatggagtccagagagtattaagcagaactgatgtcaaaaaatccacacctaagcatatcattttaaactatagaaaatcaaagatacagagaaaaataccttaaaagaagttagaggaaaagcaataccttacttatggagaagccaagataaaaattatgcgtgctttttcttagaagtcatgcaagaaaaaacacagtggaataaaatactaaagtgttaagatttttttaaaaaaggaatcacaccaacctagatttctatattcgaaaaattaatcttcagaagtgaagaa

SEQ ID NO: 1753 - DNA, 1961 bp, Homo sapiens
  source 1..1961: mol_type = other DNA
taaaaaatattatgaacataaaacaacttgtcaaaatttacgggatgcagcaaaagtaatgcttagataaaaatttataatattgaatgtgtatagtaaagagaagaaagattgaaaaatcagtcatctaagcctctaactaacaaagtagggaaataatagcaaattgaattcaaagtaggcagaagaaaaaaataaaaaattggagcagaaattaataaaatggaaaacataaaaccaatggaacaaatcaatgaaatccaaagctggtttttaaaatgacaaataaagtggataatatgctcccattataactaggaaaaaaggagagatgacacaacttactagtgtcagaaataaaggggagacatcactgaagattccatggacattaaaaagataataaataaataaataatatgaacagctttatgcctttaaggtcgctaacctagattaaatgaccaattttctgaaagacagggcccaccaaaactcacacaataagaaatagacaatctaattaggctatatctattaagaaattgaatcaataaataatgagctttcaaaggagaaatcaccagacccagatgggttcattggtaaattttacacaagttttaagcaataaattataccaattctttacaatctctttcagaagatggaagcagtaaaaatgcatcctaactcatattatataatttacacttatacaaaaacagtcaaacacattacaatcaaagtcattacaagaaaaggttattattcctcatgaaaatacaagcaaaaatcctcaacaaagtattagcaggctgaatccaacaatatacaaaaataattaaacatcacaaccaagtaagttttattcctggtatgcaaagctggttcaatattcaataatcaattaatgtaatcaataatatcagcagactaaaaaagaaaaatgatcatatcaataaatgtagaaaatgtatttgacaaagtctaacatccatttattataaaaatgctcaataaactaggaataaaaggaatcttcctcatttcatgaagaatatctacaaaactatggagataatataatacttaacagcaagaaactagaaacttttaaaataagattaggaggaaggcaagaatgcaccctcttggaactctttttcaacattatattggaagtcctagctaatgaaatgaaaaaaaagaaaaaggtgtacacattgagaaaagagaaataaaactgtttttgttttcagatgatatgattatctatgtagaacattcaacaaaattggaacaaaaaaataagaaagaacacctggaactaataaataattataaaatggttgctggatacaaggttaatacacaaaaatcaaacactttcctatataatagcaacaaacaagaggactatgaaatttaaaacataataccatttacattatcacaacaaaaatgaaatacataggtataaatctaacaatatatgcaaaatataataagatctatttgataaaaactataagacattgaataaagaaatcaaagaactaaatagatgaagagatagtctgtattcatagattaaaagacaatattgtcaagacgtgagttgttaccacctttgcctataaattaaatgcaactccaataaaaatcacagcaaattatttggttgatatcaaaaaactaattctaaagtctatttgaggaggaaaaagatccagaatagccaacataattttaaagaagaacaaagttataggactgatactacttatattctacagttactataaagctacaataatcaagactgtagtattgatggattaataaacaaatgggtcaatggaatagaatagaaagtccagtaatagacccacacaaatatagtcaactgatctttgacaaaggagcaaatgcaatataataaagaaaagatagttttt

SEQ ID NO: 1754 - DNA, 1811 bp, Homo sapiens
  source 1..1811: mol_type = other DNA
tggccaagatggcttaccagaagcagctgcagtgtgtggctcttaccaaaaaaaatgaaaatcacaagttaattctgcaccttcaactgaggtattcaggttctctcatcatgactaggcagttgttgtgacccacggagagcaaggaaaagcagggtggggcaacagcccacctaggagctacacggggtaaggggagctcccttcccccgccaggcaagagaggcggtaagtgattgtgctatgccccctgggaaaccatgcttttgccatggacctttgcaactcagaaaataggagattccccttgtgagcccacgtcaccagggcctttggccccaaccacagagctgtacagactccccagactctgttcggcagtcgctctggcaggcactgagacgcaggagttcttttgcatactttgtcctcaggaattccagtgaggcaggagattgttcacttctttaggaagagggctgaagccagggagccaagtggcatcattcagcgggccccaatcccacgaaaccttaccaactaagacccgctggcttggaaagcttgccagacagtggcagcaggctggagaattccaaaaacgactgagttcccagggagagggacagccaccactgtctctgagtctccagtcggctgttttcccctgtcggtgctggggagactgggtggttaggaccaggaggaattccccacagtgcaccacagcagttgtggcagatcatggccagactgcttctttaagtggaagcccaatccatccctcaacatcaggcaaagcctccccatgggaatttcagcaactccagccaagggtttacgaacagaactctaatctgtggggaggggcaggcatggtctttgcagttcagtctacttagtctttcctgacagctggctcagaagagtccagacagcccgaacacaggtgatttgccccagcacagtatacctgctccaccaaagggcagcaagactgcttttaaagtgaatctctgatcccttttcttctgtctgagtgagaccacccaacagtggttgccagacaccttatacaggaacattccagccagcatcaggttagtgccctctggaatggagcccccataaaaggagcacgctgccatctttgctgttttgcagactccactggtgacacctccaggtgtgggatggacccaagtgaatagggtctggagtggacccccagcaaatcgcagcagccctatggaagagaggccagatttaaaattaaaaacagaaagcaacaacaacaacatcaacaaaaaagaccccacaaaaaaaccccatccaaaggtcagcagcctcaaagaacaaagctagataaatccacaaaggtgataaagaatctgtgcaaaaatgtagaaaattcaaaaagccagagtgccttatctactccaaatgatcgcaacacctctccagcaagggcacagaactggtctgagggtgagaaggatgaatgaaagatgcaggcttcagaaggtgggtaataacaaactttgctgaagtaaagcaacatgttctaacacaatgcaaaccatgataaaacattacaggagctgataaccagaataaacagtttagagaggaacattaaattacctgatggagctgaaaaacacaacacgagaacttcacaatgcgatcacaaatgtcagtagttgaatagatcaagcagaggacagaatttcagaacttaaagattatcttactgaaataagacaggcagacaagattagagaaaaaaaattaaaagaaacaaaaccctt

SEQ ID NO: 1755 - DNA, 2165 bp, Homo sapiens
  source 1..2165: mol_type = other DNA
aaacaaaacccttgagaaatgtgggattatgtaaaaagactaaacctatgactgattggggtacctgaaagagatggggagaatggaactacgttggaaatgatacctcagaattatcatccagaagaatattccaacctagcaaggcaggccaacattcaaatttaggaaatccaaagaatcccagtgggattctccacaagaaaatcaacctcaaaacaaataatcattagattctccaaggttgaaaggaaagaaaaatgttaaggtcagccagagagaaaggacaggtcacctacaaagaaaagctcattagactaatggtggatctctcagcagaaaccctacaagccaaaagagtttaggacaaatattcaacattcttaaatgaaagaattaccaccccagaatttcatttctggccaaattaagctccataagcaaaagaaaataagatcctttacggacaagcgaatgttaagggaattcatcgccaccaggcctgccttgcaagagctcctaaaggaagcactaaatacagaaaggaaaaactgttaccagacactacaaaaacacactgaaattcacagaccaatcacactatgaaggagttacataaacaagtctacaaaataacaagctagcatcatcatgacaggaccaaatcatacataacaatattaaccttaaatgtaaatggactaaatcctccgattataagacacagaatggcagaatggataaaaacccattggtgtgctgtattcaagaaacacttttcatgtacaaagacacaaataggctgaaaaaaagtaatggaggaaaatttactaagaaaatggaaaacagaaaaaaagtaagggttggaatcctagtttctgacaaaacagactttaaactaacaaagatcaaaaaatacaaaaaagaggaatacaaaatggtaaagtgtttgattcaacaagaagagctaaatatcctaagtatatatgcacacaatataggagaacccagatttataaatgggttctgagagaccaagaaagagacttacactcccacacaataatagtgagagacttcaactataaatattagacagatcattaagacagaaaatgaacaaacatattaagtatctgaactcagctctggatcaagtgaacctcataggtatccacaaaactctttgccccaaaacaacagaatatacattgttctcatcactgcatggcactcactgtaaaagtgattatataattgaaagtaaatcactcctcagcaaatgcaacagaactgaaatcataatgaacagtctctcatattacatctcaattaaattaaaactcgagataaagaaacccactccaaaccacacaactacatggaaattgaacaagctgctcctgaatgactcatggtaaataataaaatgaaggtagatgtcaaaaagttttttgaaactaatgagaagaaagagacaacatatgagaatctctgggatgcagctaaagcagtgttaacagggaaatttatatcatgaaatgccctatcaaaaacccagaaagatctcaaattgacatcctaaaatcacaactaaaagaactagagaaccaagagcaaacgaaccacaaaactagcagaagataagaaataaccaagatcagagcagaactgaagcagatagagacatgaaaaaccgttcaaatatcaataaatccaggagctttttcttttgaaaaattaacaaaagatagaccactagctagactaataaagaagaaaagagagaagaatcaaatatacaccaatcagaaatgataaaggggatatcaccactgactccacagaaatacaaacaaccatcagagaatattatatacacctcagtgaaaatgaagtaaaaaaaatggaagaaatggatacattcttgtaggcatacatccacccaagactgaaccaggaagaagttgaatccctgaatagaccaataacaaaatctgatattaaggcagtagtaaatagcctaccaagcaaaaaaagcccaggactagatggatttacagcagaattttaccagaggtaaaaagagaagctggtagcatttcttttgaaactattccaaacaattaaaaaggaggggctcctccctaactcattttataggg

SEQ ID NO: 1756 - DNA, 583 bp, Homo sapiens
  source 1..583: mol_type = other DNA
gaaaccatctctataaaatgagtcaggaaagaagggagggggagaaatgaaaataaaccaagcttacagcacacttggcattaatcattaggtcagcttgctctctgacccgcttcctcatatttttttgcttattgccccagaaacatgtaaaccctgtcacaagattatagctctgctcaactgctctatagataacaacttaagcattgtgaaacattaagttttccctttgtgatattctttcagttgctgcaaagtagtgaaactaccaacaccagctagtctaatggaccccatgaggagctgaccctccaaagaatgcagttttcacagcctgatgacttcatctcccttatcttgaccaatctatggccccacttttgcaatcctttacccaccataatacacttatgaactccagccctgaactcctggaggagatggatttgagggcctcttcctgtctcctcacttggctgccctgcagttattaaacattttctctgctgcaaaccctgctgtttcagtgtactgatcttttactgtgtagtgggcttacgaacctgttggtcctgtaaca

SEQ ID NO: 1757 - DNA, 160 bp, Homo sapiens
  source 1..160: mol_type = other DNA
ggtcgggggaggggggagggatagcattgggagatatacctaatgctagatgacacattagtgggtgcagcgcaccagcatggcacatgtatacatatgtaactaacctgcacaatatgcacatgtaccctaaaacttagagtataataaaaaaaaaaaa

SEQ ID NO: 1758 - DNA, 971 bp, Homo sapiens
  source 1..971: mol_type = other DNA
tagaatatgcgtattaaagaaattgctggtgagggctcagaagaaaatcaggaatgtgttattagaaactggaaggatgaggatccttgttatataacagtaaaaagcttagttggattgtatcctgcagttacatggaaagcagaacttgtgataaactttaataattagctggagggttccaagcaaagtgaaaggtgtggactggtttcttggtgattagtgaaatataagaaaaaagagatagaaggaaaaactgttaagcaaaagggaaccagaatttgatgatttgggaaattctcggaccattaagattgcaaaagatgtgaaaaattagatttgctgcctgaaaagggtgttccagaaacaagaccaaggatgtggctgcacaaccttttgctagtgcctcagaaggatcagaagatctgaatattcattcacacaaagggctctttgaagagattatacatgtgacttacaggtctcctcagccatctcagcagaagccagaaatggagatgggattactcagaaaagatctgcagaggagcttcccatctaatggagtgaatcctgtgacatacacagagggcccacaaggttcttcagaatgttttatgagcagaaacgctgccagcttggactaaaaaagacagcaagaggtcacaatgaaagaaggctgatgggctctgaaaattttaccagctgtcaacaggctgataaaattacgaagctgcaaacttgtgctactttttatgaaaaaggaaaagatgacttcaagagtgtggctgagatgccagagggcaaagctgtacaacctatagattattcctaggcctgcaatatcatctaatggagctggccatttagatgaaatttagatttcaaaattgcttggaccagtgacacttttttacttcaatttttctccccttttgaatgggaatttctataacggtattttataactg

SEQ ID NO: 1759 - DNA, 289 bp, Homo sapiens
  source 1..289: mol_type = other DNA
ccacataatgacatttcagtcagtggtagactacatatatgatagtggtcccataagattataatggagctgaaaaatttctatcgcctagtgatgtcatagcctagtgatgacatatgtattgcaatacatcactcacgtgtttgtggtgatactggtgtaaacaaatctattgcactgccagtcaagtaaaagtacagcaattatgtcctgtacataatatttaataatgacaataaatgactatgttactggtttatgtatttactatactatactttttacaatt

SEQ ID NO: 1760 - DNA, 132 bp, Homo sapiens
  source 1..132: mol_type = other DNA
caggcatggtggtgcacacctgtactcccagctactcgggtggtttacacaggaggatggctttgggcctagtagttcgagtccagcctgggcagcatagtgtgagaccctgtctcttaaaaaaaaaaaaaa

SEQ ID NO: 1761 - DNA, 61 bp, Homo sapiens
  source 1..61: mol_type = other DNA
aaatctttatcagtaacttcaatgatagaatagataaaatgctcataggtctacaggtgat

SEQ ID NO: 1762 - DNA, 294 bp, Homo sapiens
  source 1..294: mol_type = other DNA
ccaggcaagcaatcagcagtgtgactctgaaagtaacaatatctcatcaatttaatctcttcctgcaatagaatgactacactggcaaactgaggtagagatcaaagtaatgatcttgattttagtacagatcccagttcttttctgcacgatgcattcaccaatgggctgatgaagtaaaatctacactgtgtagctcttagatgggcgtgcaattggctgccagtttgaaatgaaaccaagaaggaaattaatggtgggccagagggattagttgtgggaaatccatttctc

SEQ ID NO: 1763 - DNA, 293 bp, Homo sapiens
  source 1..293: mol_type = other DNA
ggccgggcatggtggctcacatctgtaatcccagcactttgggaggctgaggctggtgggtcacctgaggtcaggagtttgagaccagcctggccaacatggtgacaccccatctctactaaaaatacaaaaattagctgggcgtggtggtggcgcctgtaatcccagctactcaggagaattgcttgaacccgggagatggaggttgcagggagccgagattgcaccactgtactctggcctgggcgacagagcaagactccaactcaaaaaaaaaaaaaaaaaaaaaaaaa

SEQ ID NO: 1764 - DNA, 295 bp, Homo sapiens
  source 1..295: mol_type = other DNA
gccgggcgtggtggctcacgactgtaatcccagaactttgggaggccaaggcaggtggatcacttgaggtcaggagttcgagactagcctggccaacatggtgaaaccccatctctactaaaaatacaacagccaggtgtgatggtgcacgctcgtaatcccggctactcaggaggctgaggcaggagaatcgcttgaacccggaaggcagaggttgcagtgagctgagattgtgccactgcacgccagcctgggcaagagagtaagactctctctcaaaaaaaaaaaaaaagaa

SEQ ID NO: 1765 - DNA, 290 bp, Homo sapiens
  source 1..290: mol_type = other DNA
ggccgtgtgcagtggcttatacctgtaatcccaacattgtgaggccagtgggaggattgcttgaggccgggagtttgagaccagactgggtaacatagtgagaccctgtctctaccaaaaaaaaatgtagctgggtgtggtggtgcacacctgtaatcacagctagtctggatgctgaggcaggaggattggtagagtatgggagaagttacagtgagctatgatgtcaccactgcactccagcctgggtgatagactgatctctattcaaaaaaaaaaaagaaaaaaaa

SEQ ID NO: 1766 - DNA, 301 bp, Homo sapiens
  source 1..301: mol_type = other DNA
gcctggcttgcttctttttatcatttcagtgtcagttcatttagtcctcaaaggaggctttcccaggctatgtttctcctgctagtcactctttatcttattaccttaatttattgtctttgctaaactttaatgatctgaatttactttacttacttgttaattgtcttttttccctaccagaacgtgggctccataagagcaggaatactgtgtatgtagttcaccatagaagtctgagcacctagaacagtatctggtatatagtaggcacttcataaatatttgtgcaatgaatgaa

SEQ ID NO: 1767 - DNA, 303 bp, Homo sapiens
  source 1..303: mol_type = other DNA
ggccggcgcagtggctcacgcctgtaatcccagcactttgggaggccgaggcaggcagatcacttgaggtcacaagtttgagaccggcctggccaatatggcaaaactccttctctactaaaaatacaaaaattagctgggtgtggtagcgtgtgcctatagtcccagctactcgggaggctgaggcaggagaattgcttgaacccgggaggcagaggttgcagtgagccgagatcatgccaccgcactctagcctgggtgacagagtgagactttgtctcaaaaaaaaaaaaaaaaaaaaaa

SEQ ID NO: 1768 - DNA, 298 bp, Homo sapiens
  source 1..298: mol_type = other DNA
ccaagcgtggtggctcatgcctgtaatcccagcactctgggaggccgaggtgggtggatcacaaggtcaggagttcaagaccagcctggccaacatggtgaaactctgtctctactaaaaatacaaaaaattagctgggcgtggtggtgcgtgcctataatcccagctactcaggaggcggaggcaggagaatcgcttgaacccaggaggcgaaggttgcagtgagctgagatcatgccattgcactccagcctgggtgacatagtgagactctgtccccacttctcaaaaataaaaa

SEQ ID NO: 1769 - DNA, 477 bp, Homo sapiens
  source 1..477: mol_type = other DNA
tggcaggcagcacgttggtcccccgaggacatctgcgcccctgaactgcatgttaatatggcaaaggggagttaaggctgcagatggaatcaaggttggccttgcaatgggtgattattctgcattatccaggtagacccagtgtaatcacaagcatccttgtaagtggcaaagaggcagaggagacagcgccagagaggcagctgcatgagaaggatcaagatgttgctgactttgaagttggaagaagaaggccatgagcctcagtatgtgggcggcttctagaagctggaaggggcaaggagatggatttgacccttcagcctccaggggcagctgtacctgccatcactgattgtagcctggtgaggcctgttttagacttctgacctgtagagctgtaacataatacatttgggttgttttcaaccactaagtttgtggtaatttgttgtagcagctgtagaaaatgaatac

SEQ ID NO: 1770 - DNA, 305 bp, Homo sapiens
  source 1..305: mol_type = other DNA
cagtggctcacacttgtaatcccagcactttaggaggccaaggcaggcggatcccttgagcccaggagtttaagaacaccctgggcaacatggcaaaaccctgtctctactaaaaatacaaaaagttagccaggcgtggtggcacgaacctgtagtcccagctactcagaaggctgaagtgagaagatcacttgagtccaggaagtggaggctgcagtgagccgtgactgtaccactgcactccagcttgggagacagagtgagcagagtgagaccctgtttccaaaaaaaaaaagaaaacaaaa

SEQ ID NO: 1771 - DNA, 286 bp, Homo sapiens
  source 1..286: mol_type = other DNA
tcacgcctgtaatcccagcactttgggaggccaaggcgggcggatcacgaggtcaggagattgagaccatcctggctaacacggtgaaaccccgtctctactaaaaatacaaaaaattagccaggtgtggtggcacacacctgtaatcccagctactagggaggctgaggcaggagaatcacttgaactcaggaggcggaggttgcactgagccgagatcgtgccactgcactccaacctgggcgacaaagcaagactctgtcaaaaaacaaacaaacaaaataaa

SEQ ID NO: 1772 - DNA, 151 bp, Homo sapiens
  source 1..151: mol_type = other DNA
ggagttagaaggcatcgcctctaatccaggtttcgccatctcctctgctaagtgacgtccagcaagtcacttcactttcaggacctcaaatctcctccccagtagtaaaataggggtaataaaaacagctacagcggaagactgttgtgag

SEQ ID NO: 1773 - DNA, 73 bp, Homo sapiens
  source 1..73: mol_type = other DNA
tgtcccctcactgcactgtgagctcccgtaagggttagcgacaggttttcctcatcctggcagacccagacct

SEQ ID NO: 1774 - DNA, 289 bp, Homo sapiens
  source 1..289: mol_type = other DNA
ggctgggcatggtggctcacacctgtaatcccagcactttgggaggccgaggcaggtggatcacgaggtcagttcgagactagcctggctaatacagtgaaaccccatctctactaaaaatacaaaattagccgggcatgggggcgcgcacctgtagttccagctactcgggaggctgaggcaggataattgcttgaacccaggagatggaggttgcagtgagccaagattgccccactgcactccaccctgggcaatggagtaggactctgtctcaaaaaaaaaaaaa

SEQ ID NO: 1775 - DNA, 373 bp, Homo sapiens
  source 1..373: mol_type = other DNA
aagtttagtctaaagctatgcctttagatattttaagttcagcctaggggttctcggtatatagtgaactataacctagtaaacaggctgtaacctacgcttgaaccaatcactgagtttcagccaaagatggccacgtgttcaaaccatgttcaaacgggcaaaaaccaagctgtaaccaatcaactctttctgtacctcacttctattttctgtacctcactttactttctctctccataaattttctcccaccaagcggcaggactcatcactctgaaccttattctggttccgggacctgcccaattcgcaaatcattctgtgctcaaactccgttagatttaatgtgtctaaagtttttcttttaaca

SEQ ID NO: 1776 - DNA, 312 bp, Homo sapiens
  source 1..312: mol_type = other DNA
ggccggacgtcgtggctcacgcctgtaatctcagcactttgggaggctcaggcaagcggatcacctgagatcgggagttcgagaccagcctgaccaacacggagaaaccctgtctctactaaaaatacaaaaattagctgggcatggtggcacatgcctgtaatccccgctactcgggaggctgaggcaggagaatcacttcaacccaggagacggaggttacagtgaaccgagattgtgccattgcactccagcctgggcaacaagtgcgaaacttcgtctcaaaaacaaaaaacaaaaaacaaaaaacaa

SEQ ID NO: 1777 - DNA, 299 bp, Homo sapiens
  source 1..299: mol_type = other DNA
ggtgcctcacatctgtaatcccagcattttgggaggctgaggtgagtagatcacttgagtttaggagttcaagatcagcctggctaacatggtgaaaccctgtctttactaaaaatacaaaaaaatcagctggtatggtggtacatgcctgtaatcccagttacttggaaggctgaggcaggagaatagcttgaacccagaaggcggaagttgcagtgagccgagatcactccactgcactctagcatgggtgatggagcaagactctgtctcaaaaaaaaaaaaaaaaaaaaaaaaaa

SEQ ID NO: 1778 - DNA, 120 bp, Homo sapiens
  source 1..120: mol_type = other DNA
gccgggtgtggtggctaacgcctgtaatcctacttagcactttgcgaggccaagacaggaggatctcttgagcccaggagttcgagaccagcctgggcaacacagggagaccctgtctct

SEQ ID NO: 1779 - DNA, 61 bp, Homo sapiens
  source 1..61: mol_type = other DNA
tagttctttgcaagattgccttcatggaattgagtccaagtcttatggttctggatcaagg

SEQ ID NO: 1780 - DNA, 306 bp, Homo sapiens
  source 1..306: mol_type = other DNA
gactgggcgcggtggctcacgcctgtaatcaatcccagcactttgggaggcagagatgggtggatcacctgacgtcgggagtttgagaccagcctgaccaacatggagaaaccccatctctactaaaactacaaaattagccgggcgtggtgccacatgcctgtaatcctagctactccggaggctaaggcaggagaattgcttgaacccaggaggtgaaggttgtggtgagctgagattgtgccactgcactctagactgggcaacaagagcaagactccatctcaaaaaaaaaaaaaaaaaaaa

SEQ ID NO: 1781 - DNA, 142 bp, Homo sapiens
  source 1..142: mol_type = other DNA
cagtgtcacttgcctctagtcacagctacttggaaggctgagatgtgaagactacttgagctcagaagttccactgcactccagcctgggttacagagggaaaccttgtctctaaaaaaaagaaaaaagaaagaaagaaaaa

SEQ ID NO: 1782 - DNA, 1436 bp, Homo sapiens
  source 1..1436: mol_type = other DNA
acaaagctggaggcatcattgtacctgacttcaaactgtactacaaggctacagtaaccaaaacagcatggtactggtaccaaaacagagatacagaccaatggaacagaacagaggcctcagaaataacaccacacatcaacaaccatctgatctttgacaaacctgacaaaaacaagaaatggggaaacgattccctatttaataaatggtgttgggaaaactggctagccatatgtagaaagctgaaactggatcccttccttacaccttatacaaaaattaattcaagatggattaaagacttaaatgttagacccacaaccataaaaaccctagaagaaaacctaggcaataccattcaggacataggcatgggcaaggacttcatgactaaaacaccaaaagcaaggacaacaaaagccagaatagacaaatgggatctaattaaactaaagagcttctgcacagcaaaataaactaccatcaaagtgaacaggcaacctacagaatgggagaacatttttgcaatctacccatctgacaaagggctaatatccagaatctacgaagaacttaaacaaatttacaagaaaaaaacaactccatcaaaaagtgggcaaaggatatgaatagacacttcccaaaagaagaaagttatgcagccaacagacacacaaaaaaatgctcatcatcactggtcatcagagaaatgcaaatcaaaaccacagtgagataccgtctcacaccagttagaatggcgatcattaaaaagtcaggaaacaacagatgctggagaggatgtggagaaataggaatgcttttacagtgttggtgggagtgtaaactagttcaaccattgtgaaagacagcgtggcgattcctcaaggatctagaactagaaataccatttgacccagtgatcccattactgggtatatacccaaaggattttaaatcatgccactctaaagacatatgcacatgtatgtttattgaggcactgttcacaatagcaaagacttggaagcaacccagatgtccatcagtgatagactggattaagaaaatgtgacaaatatacaccatggaatactatgcagccataaaaaggatgagtttatgtcctttgcagggacgtggatgaagctggagaccattattctgagcaaactatcacaaggacagaaaaccaaacactgcaagttctcactcataggtgagaattgaacaatgagaacacttggagacaggatggggaacatcacacaccaggacctgtcgcagggtgggggtaggggggagggatagcattaggagaaatacctaatgtaaatgacaaattaatgggtgcagcaaaccaacatggcacatgtttacctatgtaacctgctcgttgtgcccatgtaccctagaacttaaagtataataaaaaa

SEQ ID NO: 1783 - DNA, 2184 bp, Homo sapiens
  source 1..2184: mol_type = other DNA
caattataattgaaagaggagatattataactgatatcactgaaatatgaggaatcataagagacagctatgaaaattatatgccaacaattggataacttagaagaaatagataaatttctagaaacataaaatttaccaaggccgaataatgaagaaatagaaaatctgaacagacaaatgataagcaagaagattgaattgataatcaaaaaaacctcccaaaaagaaaaacccaggatctgatggctttattggttaattctacccaacatttaaacaaaaattaatgccaattgttttcaaacccttaaaaattcaagagcagggagcacttacatcatgagaacagcattaccttgacaccaaagctagatagttggacactataagaaaagaaattataagccaatatccatgatgaacatagatgcaaaaatccttaacaaaataccagcaaactgaattcaattacacattaaaaggatcatacgccacaatcaagtggatttatctctgggctgcaaaggtagttcaacacatgcaaatcaataaatgtgatacaccacaataaccaaatgaaggacaatcatatgttcagttcaatagatgcaaaaaaaaaaaaaagcatttgacaaaattcgacatcctttcatgattaaaaattctcaacattagctataggaggaatgtgcctgaaaggccatacatcacaagcctagagccaatataatactctatggtggaaagctaaaagcttttcctctaagatgaggagcaagacaagaaaacctactcttctcacttctattcagcatgctactagaagtcctagctagagcaattaggcaagaaaaagatataaaagacaagaaaacccactcttgtcacttctattcaaaatactactggaaatcctagctagagcaattaggcaagaaaaagaaaaggcattcaaattggaagaagtaaaacagtctctgtttacagatgacataatcttgtatatagaaaaccctaaagacttcaccaaagaactgttacagctaataaatgaattcagtaagctgcaagatacaaaatcaaatacaaaaataagttgtgtttctatacactaacaatgaactgagaaggaaattaagaagataatcctatttacaatagcataaagaaatacttcaaatacatttaaccagggaggcaaaagatttgtatactgaaaactctcaaacattgatgaaagaaactgaaatagacacagataaatggaaagatattctattttcatggattggaagaatcgataatgttaaaatgtccatactactcatataaacctaaagattcagtgcaatcactctcaaaattcccatggcatttctcacagatagaaaagctatcctaaaatttgtaagtaaccataaaagatcgcaactagccaaagcaatcttgagcaagaacaaagctggaggcatcatgctacctaatttcaaaatatactataaaactataataatcgaaacagcgtggtccaggcacaaaaacacataggccaattgaacagaatagagagctcagaaataaatccacgcacttacagtcaattgatctttgacaaaggtgccaagaaaacacagtgggggaatagacagtctctaatcagtagtggtatggaaaccatatattcacatgcagaaaaatgaaattgtactcatgtcacttcatatgcaaaaatcaagtcaaaatggattaaagcttaaatgtaagacctgaaactataaaaatactggaagaaaaagaaaacatgagggagaaattcttggtattggtctgggtactgatttttttgatatgacacagcacaggcaacaaaagcaaaaatagtcaaatagggttatattaaaccagaaagcttctggacatgaaaggaaggacatagagtgaagagacaacctatggaacaggagaaagtatttccaaactatgcctcaaataaagcattaatatctgaattatataaggaactcaaacaaatcagtagcaggaaagtaaataatccaattaaagaagtaaaaggacttgaacagacatttctcaaaagaagatgtgcaaatggctagcaggtatatgaaaaaattctcaacaccactaattatcagcaaaatgcaaattaaaaccacagtg

SEQ ID NO: 1784 - DNA, 312 bp, Homo sapiens
  source 1..312: mol_type = other DNA
ggccaggcgtggtagctcacgcctgtaatcccagcactttgggaggctgaggcaggaggacaacgaggtcaggagattgagaccatcctggctaacatggtgaaaccccgtctctactaaaaaatacaaaaaaattagctgggcatggtggcaggcgcctgtagtcccagctactcaggaggccgaggcaggagaatggcgtgaacctaggaggtggaggttgcagtgagccgagatcatgccactgcactccagcctgggcaacagaacaagactccgtctcaaaaaaaaaaaaaaaaaaaaaaaaaaaga

SEQ ID NO: 1785 - DNA, 651 bp, Homo sapiens
  source 1..651: mol_type = other DNA
ctagaaaaagatgagcaaactaaaccaaaagcaaacaatggatataataaagatgagagccgatataagtgaactagagaataaaaaaatgagaaatactttttaaagtttattatctaaaaagataaagagattgacaaactttgagctaaactgaccaagaaaagaaaaaaaaagaaaactcaaagtactaaaaacaggaaagaaacagtacattactacaactttgtagggtaggcataacaaggatcgtaaagaaataatgtgaactgaatactaacaaattaaataactaaagggaagggacaaattcttacaaagtcacagactatcaaaattgacttaggatgaaacagacaatctgaataaacctgtaacaagtgaagagattgcattagtaattttaaaacttcccataaaaaaaaaaaaaaaatctcaggcccaggcagcttcactggtgaattgtaccaattttaagaaaaactgataccaattcttcacaaactcttctaaaacagagaagagttttggaacctggaacatttcctaattcattttacaagaccattattatccagttaacaacatcaaagaaatctcaagaaatgaaaactacagactgatatatcttatgaaaataggcacaaaaac

SEQ ID NO: 1786 - DNA, 76 bp, Homo sapiens
  source 1..76: mol_type = other DNA
taaggcaaaataaacttggagattaagatggattggcagaattcactgctagcaaacttgacagactgataaaaat

SEQ ID NO: 1787 - DNA, 308 bp, Homo sapiens
  source 1..308: mol_type = other DNA
ggccgggtgtggtggctcatgcctgttatctcagtactttgagaggccgaggtagacagattacctgaggtcaggaattcaagaccagcctggccaacatggcaaaactccatctctacaaaaaatacaaaaatagccaggtgtggtggcaggcgcctgtaatcccagatactctggaggctgaggcaggggaagtgcttgaacccgggaggtagaggttgcggtgagccgagatcacaccactgcactccagcctgggtaacagagaaagactccatcgcaaaaaacacaaataaccggaaaaaaaa

SEQ ID NO: 1788 - DNA, 1968 bp, Homo sapiens
  source 1..1968: mol_type = other DNA
aaaaaaacataattggagaaaactgcttgaaaagaaaacaaaaactcagtgctctggggagtgttctaagggaatacagcaaacgaaaaactattttattttaaataatctactaaatctcaatagaaatagcaagaatctatagtatctgagccacactgcccctttcttccctctgcccgctcagcataatgaaatttctaatcctggcagatggggtcaagacagggctctctccctgcctagtttccagtcaagggttagagtatctctccaggacagacaggccaacagaatttcttatactcaactccctcacttctgccaccagcctcaaaacacaggcagaggctctaccgtaaacatgacaggcctagaacacaggggccccatttgccttcaacccatctcactcataagaccgtggttacacacagggataggtaagccaaaaagactagaggctaccaccctgcccactggtagtggctcagagattctgctgcagagcaggagcagacctaagagcagagaactctaaaagcctcccaaaaagaaaagactttatttgggacagagtgtagagaagttcaagcctaagggtaccctcaaaaatatggagatttgggcagtaagcaactaaaaggaagctggtagctctaagacaggaacaagttaaaccacgggctagctagtgtaccaaagagaactgggaagagagatagctaggaacagacctccgcagttcataacaaacactgaagactagcctcaaaaaaatgcccctacaaaggggccaaaatttaatttgatctcactgtggagaaatttatgctccagagaactgttaataacaaaagagcagtcaccagcagttagtaaaggctatcatatctgggtgtgacaccaacagaagcagaggttttaacagatatatataagtgaaaaagacaatcggaaatggtcctactaaaatcactgtcatcccaatataattgcccatgtccaaggctgtaccctctcatgggtgacatcaggcacttcacacggcaagaaatataaaacttcattgaaaaagcccagccaagccattaaacaagcaaacaagcacaaaggagaagaaagatcagtatccagagatgctgcaaagttcatgtaaaatgtccagcctctcgcccacaaattatgacatgcaaataaatagaagtaattcatacacagggtgaaaaagcagtcaacgaaaactgcctgtttaagagccaagatgtcagacttaataaagacttcaaagcagtcgttaaaaatatattcaataatttaaggaaatcatgatcaaagacgtaaaggaaagtgtgatgtgacaatgtcttatctttaagaaagagataagaaaaaaagagatattatgtagttaacaagtaaaatgaactgaaaaattcagaggctcaaaaataagaggggctcaaaagcatatctgaaccaggagaacaaggagaatgtaaatttgacaacagattcatagggttgtgcaattcagagaaaaattaattaaaaaatgtgaacaaaacctcaggaaaaaaaagcataggatactattaagtgaatcaacatatgtgtaatgggagtaagaagaaaggagagagaaaagaacagaaaaatatttcaggaaataatggctgataacctctgaaattgaagaaaaacactaatctacacatccaagaagagttaccaagtagggtaaacaaaacgattcatgcccagaaacatcatagcacaaaacgttggaagccaatgacaaaaagactcttgaaagcagcaagagaaaagtgacttgtcacaactaacttttcattagaaataatggtggccagaaagatgtaggatgacatattcaaaacaatgaagaaaaaactgtcaataaagaattttatatccagcaaaaccatccttcaaaaaaggcaaaat

SEQ ID NO: 1789 - DNA, 295 bp, Homo sapiens
  source 1..295: mol_type = other DNA
cgggcaccggtggctcacgcctgtaatcccagcactttcagaggccaaggcgggcagatcacgaggtcaggagttcgaggccagcctgaccaacatggtgaaactccatctctactaaaaatacaaaaattagctgggtgtggtggcgcacgcctgtaatcccagctactcaggagactgaggcaggagaatcgcttgaacccaggaggcggaggttgcagtgagcgcaccactgcactccagcctgggtgacagagcaagagtccgtctcaaaaaaaaagaaaaaaaaaaaaaa

SEQ ID NO: 1790 - DNA, 501 bp, Homo sapiens
  source 1..501: mol_type = other DNA
gaaaccccaaatcttcacaggcctgcaaggtcttacatgattattgtttgtcccctaaccccacctcaacagcttttccctttgttcactgtattccagcttcactggccaccttgttatatctcaggcatgtcagtcatgtccctgccttagttgctctaggagttccctcagactagaagagtcttctgccagataattaatatgactatgtcccttatagccttcaaatcttcagatctgaccaccttaatgaaacctaactgaccaccctatttaataattatgcatccagtctcccctcccagttcccctctaacatgggccattgtttatttatttattctgttaattgattttgtctgtccccctccaatccaccatcctcaaccagaaagtaagtttcatgttgtcagtgatcttgttttgctcactgatgtgtcgtaagctcctagaacagtgccaggcatataataggcactcagtaaatatttgatgaat

SEQ ID NO: 1791 - DNA, 110 bp, Homo sapiens
  source 1..110: mol_type = other DNA
aaccatccagagattgtggcaatatctttcttctaaacagtcagatattcttgcattaagcttggcgaaactgcctttcaaaaacagaaggggaagtaaaatgaaggaag

SEQ ID NO: 1792 - DNA, 354 bp, Homo sapiens
  source 1..354: mol_type = other DNA
ggacaggcatggtggcttatgcctatactcctagcactttgggagtctgagccaggaggatcacttgagcccaggagttcaagaccagactgggcaatataatgagaccccatctctacaaaaataaaaattagccaggtgtggtggtgcatggtagtgtatgtctatagtcccagttactcaagaggctgaggtgggaggatcacttgagcccaggaggtcaagactacagtgaaccatgattgtatcactccagtcatggagaaccatgattgtatcactccagtcatggagaaccatgattgtactccggcctgagtgacagagcaagaccctgtctcaaaaaaaaaaaaa

SEQ ID NO: 1793 - DNA, 567 bp, Homo sapiens
  source 1..567: mol_type = other DNA
aaccctcatgtattgccggtgagatgtaacttggtgctgctgctgttgaagacagtttggtggttcctcaaaaagttaaacagaattattatacaatccagcaagtctactgctaggtatatacccaggagatttagaaacgtacgttgatataaaaacttgtacacaaatgctcatagcagcatcattcataataggcaagaaatagagacaacccaaatgtccatcagttgaatgaataaacaaaatggcgtatccatagaaaggagtattatttagccataaaaatgaaatactgatggatgctataacaggaatgaaccttgaaaacattacgctaactgaaagaagccagacagaaatggccacacattatatgattccactgatataaaatccataaaggcaaatccatagagatagaagattagtggttgtcaggggagagttggaggtactgggctgttttggggaaggtaatggaaatgttctggaattagtggtaatggtttcacaacattgtgaacacactaaacattactggattgtactgtttaaagtggttaa

SEQ ID NO: 1794 - DNA, 340 bp, Homo sapiens
  source 1..340: mol_type = other DNA
gctgggcgcagtggcccaagcctgtaatcccagcactttgggaggctgaggcgggacgatcacctgaggtcaggagttcaagaccagcctgaccaacgtggtgaaaccctgtctctactaaaaatacaaaaaaaaaaaaaaaataaaataaaataaaaaaatgagctgggcatagtggcaggtgcctgtaatcccagctactcaggaggctgaggcaggagaatcgcttgaacccaggagatggaggttgcagtgaaccaagattgtgccgttgcacttcagtctgggcgacaagagagaaactccatcccaaaaaaaaaaaaaaaaaaaaaaaaaaaaa

SEQ ID NO: 1795 - DNA, 227 bp, Homo sapiens
  source 1..227: mol_type = other DNA
gaacaataggacttagcattagaagactgggttcaaatcctgattctgcttttaacaagtagtggacgggttatggacaactaatatcctaagcctcagttatttcacctgaaaattggggtgctaatgataataaatgctatggaaataagatgaataatagccatggaaataagatgagttaatggctatgaacgtgctttgtaatatgaaaatgctataaaatg

SEQ ID NO: 1796 - DNA, 2989 bp, Homo sapiens
  source 1..2989: mol_type = other DNA
gaagacttcccaactctccctataaattgccaagtgaagcaccccagatgaagcagctgatatgcttcatatgcaagtcatgtgggactggctttaggaagaccaagatactctcccattgacaatgcttatgacccagattatagtaaatgctgtggttaagggggcccttctccatgggcaccccaggtgacattactcctacagaatcaaagaattgtttgagaagactcatcaaattttccgtcctcataggtcttacagatgctagtaaaacattagagtaattaacaaaataaaacaaaaatgggaaaggcaaaagaaagtcaaaggactcatcccagaagggtggtgtaaatctttagatggttattaagaaatgaaataaataaaatgaaaatggatggaattaaaacaaaggtctttacaacactgtcaaatgttgagtggaccaagagaatgtctgctggtccccagctttaaagggtcacaaaccagtgttctgcatttgcctcagactggagaaatttaagaaaaatcaaaaggcaaaggttataatgagaaagctgacattgccttgggtaacgctgaggcaaattaagataaagatttacaaaagggtctgagtaacttcgctcaactccctgctggaaacctaaatcctttttcaccggaaaaggtaaaatggtctaggggtaaagaagacaagttcctgagaccagaacataaaaatgtaaaggttgataggattatgaaatttgagatgtttaaacagactttatgtaaggtagttgtgatatctttatgcaaatgtcttatgaaaacgggtattgtatgtaactgggggatgtttcccctacctagtactataaaactgaaggcatgtaaatcgaccctttaagaaatattaattggacacactaaatgggaactattaatagtaagattgcctgagtccacagaatatagggtagaagctggagcactagtcaggactagcactttataataagcataaaacctccacttgatagctctttgtggagcatttattagggcttatagcaaaaaacgtatgagcacataggactttggactggagaatttccacttgaggggcatttactgccttgctatggaatgttaactaaagctactcgtatgctaatggaaataatgatgcccaaaacagttctatgataaaataaaagtggtttatatagaatcctgctatgtggtgatgcaaggaggaggtacttatgagcagggagtctctttttttttttttccctaggactaactctatttgaggagctgccagatcctacagtgcctgatagacagctcttatctgacaagagcagcttggcttgagaatggcagttccaaagtgaacaaacaacatcttctttggaaggctactgttctggttaaagaagagtcaaggaaatattttacttctgagttatttattgtttagcaccattggagaaagtatgtttttgtcagcaaatttacctttctctctgagttctccaaaatttaaaaactatttgtgatttcatgaaaatatagttatctgcataaatttagtaagaatctttttttaaaacaggaagattggagacattggttattttaccaaggcttggactaaaataacatatttttaggtaaagttccaacaaagccaacttgaaaatagcctatatggctaatatattattgctacactttatgtgaataatcaggccaagtataataagcataaaacttattttaaacacaagttggtcttactgtaattttctttagtagaaagaagggctagagagagagagaaattgtttcaaaggaaaactgtaacacctgttactagtttctagccttgactttgcttttgagtgcaggttgaatcatgaattattccttagctacaataatcccctaaagacaaaaggttataatttttcttcatgtttttagttagcattctaatggaatagatttcgttgtctgttctgacacacatattctcttttaattttcaaattattaatattatttatctcttgttttattacttcttctgagaaaaccagaattgtggtattctgaagactagagattatttgacaaagcctgcgaatctccgtcatttggaattccactgggcccgatgtatttttcactgccaattccctgctgctaaagctttacaagcattctccctcaaagcccagtgactatcacagaagaggtgggcatgtgagattgtaaggaacagtgttgagggacagaattagttcagaccctctgaatcaagaatgggtacacagatgtctaaacagctggtaaaacaagggactttgccttcagtactattatgtagcagcttctcacccatcccaaccataaaaaatttactgcttcctatagaattaaaagaaaattattactcagaggatataaagataccttgtgacaaagcctcctgggtataatactcccagttatgagatttatgtagatagaggtattttaaaaaaattgtcagccaccttaaaacaaattactaaaagaccacaaaaagcattatgacaaaatctccaaatttcttagcttaaaaggatttaaccatgcttatgttttatatagctaatcgctataagtctgttataaaaccaaaattacagtagctcagcacatagaagttaaagataagttaattttgaacctcacctttggctttttgtttgttggtttttatattacataaaaaatgtttaaaggttaatgaatgcctgctcatatccactggcatctagcttacaacatttaaattggccataagtcttttggctctaaggctcttggctataggggttctaccgagggacaggatggatccagggcaggcagccatgccacccagcaatgctttgggacaaaataaaagtttggtggccattgatgttgcttctggcaa

SEQ ID NO: 1797 - DNA, 368 bp, Homo sapiens
  source 1..368: mol_type = other DNA
tctaacacgtcagcactaaaccttgttttgacagtggtttgacagatggcatcccctttttctagagtaagcctccaccccttttctaaacctgatgaactccaatgtcttcaccaggagtacttcaagacattgcaaaaataccacctcttctgggaagtttcaccccatcctgttatttgtgtcaaatgtctttcaggtcctctttcacagccctcagggcctgcaaacctcatcagaggactgatatccccacctagtgctgtgccttctccaccactttgagcacagtgaggacaacatctttgtatcttcagcacagtgtctgggatagaataggcatttaatacatttgttgactgtctaaa

SEQ ID NO: 1798 - DNA, 436 bp, Homo sapiens
  source 1..436: mol_type = other DNA
agtgaaagaagctaatctgaaaaggctacatactgagtgattccaattataacattctggaaaaggaccttgaagacaatataaagatccatggttgccaagggttaggggaaagggaagggatgaatgagcagagcacagggagtatttgggtcagtaaaactattctgcgtgatactataatggtggatacctgtcttatacatttgacaaaactcaggcatgtacagagtagaccataatgtagtaatgtaaactatgaactaggatgataattgtatgccaattttggttcatcagttacaacaaatgtattgctctggtacaaacttttgataatgggggaggctatgtatatgtagtggtaagatgtatatgagaatcctactttcttagttgatattgctatgaatctaaaactactttaaaaaataaa

SEQ ID NO: 1799 - DNA, 201 bp, Homo sapiens
  source 1..201: mol_type = other DNA
aatatttttaatgagttattattttaaaattagagatttcacataaaaaccaggattctttgttttctctttaaaaaaacagaggctcttgcaacaggagacctgcctcctttttgggccatattctgctgggtccgctgctccttgaggtatagcaggtgatctgcagtcttcaccattttctactgtcctttgtccctc

SEQ ID NO: 1800 - DNA, 5951 bp, Homo sapiens
  source 1..5951: mol_type = other DNA
aggaggacaagatggctgactagatgcagccagaaagcactgctcccaccaagagagaccaaattattaagtcagccaccataatttgagcagatattgggagagaaaaagctgatagtggatggagatgtgactctgaaactgaggctgaatagaaaggaagctggcagccctacttagggtacctgatcactagggccagttcccagccactaatggctcgtgggagaggggtgagtgagggaaatgagatttggttcagtctccccatggacctctgggaacttagtgacaggggaccctgcatcccctatggacatgtgagatgtcaggagatctctccagggaataggcagagacaggccttgagacggcatggagcccaggagtttttgtgtgctggcagctctagtgaaaagcagccataaacgcccatcacttgggcccgcctccccactcccccagaggcattggccccagctgacttctgagccagaagagagctgaactttctttgcaacagatgtgaccggggcacatctgttctgcaaacccttccacatgctgtcccctgacccccgcagggcctgtgcctagctgccctgcaggagtgggtgcaccccacagcctccacggccctgctgaatgtgttgctgtatatgagtactttccagacagcacaggaacacaacagacaccctggcacagctagaacccaaccatgaaccacggatgtcctggttccccagggctgcagtgaagagctcagtgctgcggccagcactcaggcaggggaggaaccccccttgcaggagaggaaaccccagctcagaacactgagaggggccagttgctgggtcccgggccccaggtaggagtggagtatgcctccctctgaagagctggttcataaacggtgcggcatatctccctgtcacaacctttgcccaagagaggctcgtggcctggaacccctaccaaaagaaaccgaggcacagcgctggtgactgtagagggctccccacaaggcccgagagcagacatggtgagcgagccatctttattcctccccgcgaatgctaggaagtagaagagtcagggactaggtatcagcctagctgccagccattactcttaagtgccatctacaggatcacagtccaaactacagcatcaacaattatcctattaatatatacacctgtgaaaacaagcccaagaattcacccacaacaaaaatcctgcacaaagccctggtgctctgaaagcatccagaaacaaagcaactgactatactcaacttatactacagttaaaggaacatcaaaactctctgatgagaaagaatcagttccggaactcttgacaattcaaaaagacagtatccccttctaacaagtccactagctcctcagcaatggttcttagccagtctgaaatgactgaaatgacaaacatagaattcagaatctggacggcaagaatctcatcaagattcaggataaagtaaacccatccaaaaaatccagggaatctagtaaaatgatccaagatttgaaatatgaaatagccattttaagaaagaaccaaactgaacttctaaagctggaaaactcactacaagaatttcatagtataatttgaagtattaacagcagaacagaccaagctgaggaaagaatctcagagcttaaagaccagtttttgaagcaactaagtcaaaaaggaattgggaaaaatgaacaaaacctctatgaaatatgggattatgtaaagagaataaatctatgattcattggcatcctgacagagaaagaaagaaaataaacaatttggaaaatatatttgcaaatgtagtccatgaaaattctcctaatctcactagagaggttgacatgaaaatctaagagatacagataaccccagctagataagttgatcgtccccaaggcatgtagatttttttaacaaaaaaatcttaaaggcagctagagataaaggtcaagtcaggtacaaaagtaactttatcagactagcaaaagacctcttagcagaaatcctacttgccggaagagatagggagactgttatcagtgtccttaaaaaatcaaccaagaattttaaatcccaccaaactaagcttcataattgaaggagaaataaaatccttctcagacaagcaaatattgagggatttgttttcaactagactagttttacaagggatccataaaggagtgctaaacttagaatcaaaagaacaaaacctgctaccacaaaaacacatttaagtgcatagccctcaggtactataaagcaactgtaaaatcaaatctacatagcaaccagctagcaacataatgacaggatcaaaaatcacacatatcaatattaaccttgaatgtaaatggggtaaatgttccactgaaaggacacagagtggcaaactgtgtaaaatacaagattcaaccttctgctttcttccagggacccatttcacatgtaacaacacccacaggttcaaagtaaaagaataaggaaagatctaccatgcaaatggaaaacaaaaaagagaaagcgtccctatttctatatcagatgaaacagacttttcaccaataaaaattaagaaggacaatgaagggcattgcataatattaatgagtacagttgaacaaggagacttaaccattctaaatgtatacatacccaacattggagcacccagtttaataaaacaagttcttcttggcctatgagaagacttagacaatcacacagtaatgatgggagacttcaacgccccactgacagccttagattgtcaaagcagcaaaacaacaaagaaactgtggacttaaactcaacatttgaccaattggtcctagtagacatctatagaacactccacccaacaaccacagaatatacattattctcatctgcacacagaacatattttaagattgatgacatgcttactcataacagaaatctcaataaattaaaaaaattaaaatcataccaactacattcttggatcacagtgcaataaaaatagaaattgatagcaaaaaaaatctatagtatacaaatacatgaaaattaaacaatttactcctgaataatccctgggtgaacattaaaataaaaaaaattctttgaaattaatgaaaataggtataaaacttatccaaatctctaggatacaactgaagcaatgttaagagggaagtctatagccctaaataccttcattaaaaagttagaaagagttcaaattagcactctaactttgcactgaaaggacctaggaaaaataaaaagaagaaaccaaccccaaaactagcagacataaagaaataactaaaattagagaacaataaaattgacatgcaaaaatatattttaaaaattgatgaaaccaagacttgttttttgaaaaaataagcaaggttgacatactactagctatattagcaaagaaaaaaaatagaagatccaaataagtacagtcagaaatgataaagatgacattacaactgatcccacagaaacacaaaggattctcggagagtattacaagcaactctatgcacacaaattttaaaatctagaagaaatagataaatgcttggaaacatacaatttcccaagattgaatcaggcagagattgaaaccctgaaaagacccataacaagttctgaagttcaatcagtaataagaaacctaccaatcaaaaaagccctggaccagatggattcacagctgaattttaccagatctataaagaagaactggtaccaatcctactgaaactattccaaaaaattgaagtggagggactcctccctaactcattctatgaagccagaatcagcctaataccaaaatctgacagagacacaacaaagaaataaaactacaggccagtatcccttatgatcatagttgcaaaaatcctcaacagaatactataaaacagaattcaacagcacatcaaaaaactaattcaccacaatcaagtgggcttgattcctgggatgcaaggttggttcaaaatatgtaaatgagtaaatgtgattcatcacataagcagaattaaaagcaaaaacaatgtgatcatctcaatagacacagaaaaaacttgtgataaaattcaacatctcttcatgataaaaacccccaacagactaggcatcaaaggaatatacctcaaaataagaagagccatctttaacaaacacacaaccaacatcatactgaatgagcaaaaactagaaccgtcccccttgagaaatggaaccagacaaagatgtccattctcaccacgcctatttgacataatacgagaagtcttagccagagcattcaaataagagaaagaaataaaaggcatccaaatatgaaaaaaagtcaaaatatctctcttcactgatgatatggttctgtacttagaaaactctaaagactctgccaaaaggctactagaaatgataagtgactttaacacagtttcaggatacaaaatcaatgttaaaaaatcagtagcaattctatacatcaataatgtttaggctaaaagtcaattcagaacacaattccatttacagtagccacaaagaaaatgaaatatgtaggaattcagctaaccacagagttgaaagttctgtacaagaggaactgcaaaactgctgaaataaatcagagatgacacaaataaatggaaaaaacattccattctcatggattgtaggaccaatatcattaaaatgtccatacacctgaagcaatttacagattcaactacttctatcaaactaacaatgtcattcttcacagaattagagaaaactattctaaaattcatatggaaccaaaaaagagcccaaatagccaaagcaatcctaagcaaaagaacaaagttggaggcatcacactgctctacttcaaactataagcctccagtaaccaaaacagcatggtattggtacagggacacataaaccaatagaacagaatagaaaactcagaaataaagataccacctacaaccatcagatcttcgatgaggctgacaatagcaagccatgaggaggtgactccctattcaattaatggtgctgggataacgggctagccacatgtagaagattgaaactgggcccctacctcccaccttatataaaaattaactagagatggattaaaggtttaaatgtaagacatcaaactatagaaatcctaaaataaaactgaagaaataccattctcaacatcggcattggcaaatatttttttgccaagtccccaaaagcaactacaacaaaagcaaaaatggacaaatggtacctaattaaactaaagagcttctgcacagtgaaataaactatcaacaaagtaaacagatgacctacagaatgggaggaaatatttgtgaactatgtgtctgacagaggtctaatatacagaatctttaaggaacttaaatcaacaagcaaaaaacaaataacctcattaaaaatgggcaaaggaaatgaacagatacttttcaaaggaagacattcaagtggccagcaaacataaaaaatactgaacatcactaagcatcagagaattgcaaatgaaaaccacaatgagatactatctcacaccaggcaaaatcgctattactacaaagccaggaaacaatagatgctggtgatgctgtggataaagagaacacttatacactattggtgggaatgtaaatgagttcagccactgtaaaaagcagtttggagatatttcaaataacttaaaacagagctacaattcaacctagccatcccattactgggtatatactcaaaggaaaatcaatcattataccaaaaagttacatggactcatatgttcagtgtcattctattcacaatggcaaagacatggaatcaacctgggtgcccat

SEQ ID NO: 1801 - DNA, 1570 bp, Homo sapiens
  source 1..1570: mol_type = other DNA
tgagaggtgacagcgtgctggcagccctcacagccctcgcttgctctgggcacctcctcggccttggcgcccactctggtcacgcttgaggagcccttcagcatgccgctgcactatgggagcccctttctgggctggccaaggccggagccagcttcctcagcttgcggggaggtgtggaggcagaggcgtgggcaggaactggggctgcacgcagtgcttgcaggccagcgcgagttccaggtgggcatgggctcggcggccctgcactatgagcagccagccagcccgctgcactgggcagtgaggagcttagcacctgggccagcagctgcgctggacttctcgtcgggccttagctgcctccccgccaggcagggctcgggacctgcagcaccccatgcctgagcctccgccctcaccctgcggcctcctgcgtggcccgagcctccccgacgagcgctgccccctgctccaggtgcccagtcccatcgaccacccaagggctgaggagtgctggcgcaaggcccaggactggcaggcagctccacctgtggccccagtgcgggatccactgggtgaagccagttgggctcctgagtgtggtgggggcttggagaacctttatgtctagctaagggattgtaaatacaccaattggcactctgtatctacctcaaggtttgtaaacaccaatcagcactctgtgtctagctcagggtttgtgaatgcacccatgacactctgtatctagctactctggtggggacttggagaacctttatgtctagctaagggtttgtaaatataccagttgcactctgtatctagttcaaggtttgtaaatacaccagtcagcaccctgtgtctagctcagggtttgtgaatgcaccaatcgacactctgtatgtagctaatctagtggggatgtggagaacttttgtgtggacactgtgtatctagctagtctcgtggggaagtggagaacttttgtgtctagcgcagggattgtaaatgcaccaatcagcaccctgtgaaaacggaccaatcagctctctgtaaaacagaccaattggctctgtgtaaaatggaccaatcagcaggatgtgggtggggccagatagaataaaagcaggctgcccaagctagcagtggcaacccgcaggggccgttttccgtgctgtggtagctttgttcttttgctctttgcaataaatcttgctgctgctcactctttgggtccacactgcctttatgagctgtaacactcatggcgaaggtctgcagcttcactcctgaagccagcaagaccacgaacccactgggagaaaggaacaactccagatgcgctgcttaaagagctgtaacacttatcgggaaggtctgcagcttcactcctgagccagcgagaccacgaacccaccagaaggaggaagctccgaacatatctgaacatcagaaggaacaaactccggacacgctgcctttaagaactgtaacactcactgcgagggtctgtggcttcattcttgaagtcagtgagaccaagaacctaccaatcccagacaca

SEQ ID NO: 1802 - DNA, 305 bp, Homo sapiens
  source 1..305: mol_type = other DNA
gccgggctcggtggctcacggctgtaatcccagtactttgggaggccgaggtaggcagatcacctgaggtcaggagttcaagaccagcctgaccaacacggagaaaccctatctctgctaaaaatacaaaattagctgggcatgatggtgcacgcctgtaatcccagctactcaggagactgaggtaggagaattggttgaaactgggaggcagaggttgcaatgatgagctgagatcgcgccattgcactccagcccgggcagcaagagcgaaactctatctcaggaaaaaaaaaaaaaaagaa

SEQ ID NO: 1803 - DNA, 163 bp, Homo sapiens
  source 1..163: mol_type = other DNA
agtggttttcaaccctcacttcatattagaatcatctgaggacttttaatatggaatccacctcataacaattaagtctaaatttctggaagatggagccatgcttgtttttccaaaagctctttgagtgattctaatttgtagtcagagttgaagaccactg

SEQ ID NO: 1804 - DNA, 1860 bp, Homo sapiens
  source 1..1860: mol_type = other DNA
atgggaaaaagacccaacccaactatatgctgcatacaagaaactcatctcacctgtaaagggttacagaggttgaaagtgaatgaatagaaaaagatattgcaagtaaatggaaaccaaaagggagcaggagtagctgtacttatatcagaaaaaatagacttcaagtcaaaagctgtaaaaagaaacaagcaagaacattacataataataaaagaattaattcagcaagaaaataaaacaattgtaaatatatatgcaccccacactggagcacccagacatataaagaaaatattattagacctgaacaaagaaatcccaatacaatagttggggactttgacaatccacttagcattcagcagatcatctagacagaaaatcaacaaaaaaaaaaatctgatttaaactgcaccataaaccagatggacctgacagacatttacaaaacatgtcatccaacagctacagaatacacattcttttcatcagcacatggaattctcctgtaatgcctatatattaagactcaaaacaagtctcaaaaaaattttaaaaattaaattataccaagtatcttatctgaccataatagaatgcaactagaaatcagtaacaagaggaacacttgaaactatacgaatgcatggaaattaaacaacctactcttaactaatgaatgaagaaattaaaaataaaattagaaaattccttgaaacaaaagaaaatcaaaatacaacatcccaaaacctatgcaacacagcaaaaccagtattaagacaagtttataacaataaatacctacctcaaaaaattagaaacatttcaaataaacaacctaatgatgcatctcaaaaaactagaaaagcaaggacaagtcaaacctaaaagtagtagaaggaaattataaagatcagaacggaaattaataaaattgagactaagaaaacataattttaaaaatcaaccacaaaaaaagttggcttttcaaaaacgtaaacaaaagtctcccatcaacaacaacaacaaaaactccaggactagatgactccactgctgaattctaccaaagttttacagaagaagtaataccaattctctcaaaaaaaactgatgcaaagggagttctttcttactcatttcatgagaccagcacaaccctaataccaaaaccagacaggaacacatacacaaaatgaaaattacgagccaatatccctgatgaacagagacataaaaatcttcaacaaaatactggtaaacagaatccaacaacagatcaaaaagataatataccatgatcaaatgggattaatcccaggaatgcaagaatggttcaacatatgcaaattaacaaaagtgatacatcctatcaacagaatgaaggacaaaaaccatatgatcattgcaatagatgcagaaaaaacatttgaaaaaactcaacaccccttcatataaaaattctcaataattaagtatagaaggaaggtaccgccaaacaataaagaccacatgtgacagactcacggctaacatcatattgaatggggaatagctgaaagtaagaactggaacaggacaaggaggcccattttcactactgttttgtgatatggtactggaaatcctagtcagaataattagggaagagaaagaaataaggggaatccaaattagaaagaaggaattcaaattgtccctgttttcacaggacatgatcttatatatagaaaaacctagactccaccaaaaaactcttagaactgataaacaaattcagtaaagttacaggatacaaaatcaatatgtgaaaatcagtagcatttctatacaccagcaatgaattagaaatcaaga

SEQ ID NO: 1805 - DNA, 285 bp, Homo sapiens
  source 1..285: mol_type = other DNA
ggctgggcatggtggctcatgcctgtaatcccagcactttgggaggtcgaggcaggcggatcacgaggttaggagtttgagaccagcctgaccaacatgaagaaaccctgtctctactaaaaatacaaaattagccaggcatggaggcaggcgcctgtaatcccaactactcgggaggctgaggcaggagaatcgcttgaacccgggaggcggaggttgcggtgagttgagattgtgccattgcactccagcctgggtgacaaagcgagtctcaaaaaaaaaaaa

SEQ ID NO: 1806 - DNA, 39 bp, Homo sapiens
  source 1..39: mol_type = other DNA
acttttccatagtgccaaagccatacatattcagtagaa

SEQ ID NO: 1807 - DNA, 201 bp, Homo sapiens
  source 1..201: mol_type = other DNA
tcagtagaacatcaataaattacatcagaaattcaacactttattataaaacgggcttcgtgttagataattttgctaaacagtaggctactgtaagtgttctgagcatatttaagacaggctagcattttcaatttacaatattttcaactgatagtaggtttattgggatgtaaccctatgataagttgagaaacatct

SEQ ID NO: 1808 - DNA, 159 bp, Homo sapiens
  source 1..159: mol_type = other DNA
cattgtgatgcactaaaaaaaagctttggagcctgatagtttggctcctggctctcccacttgtttgggtaaggttcgagtcactgtaaaatgtaattatactcccttttcaaaggattattttgagaatttaataagaattgatggaaggggcctagc

SEQ ID NO: 1809 - DNA, 591 bp, Homo sapiens
  source 1..591: mol_type = other DNA
tttctccctatcacctactcattaaaacttttaacagtttccactgtagcctctggaatccctattctgataccaataactttttttgcaatctcaacatttttttaatgcctctccccctgctgaaaactgctttcttcctctcatggcatataacctggaatgccttttaagtagaaattacttttccttcctctctcctgcaacaagagaccaagaagagaaatgagcatttgtaagccccgtttgtgcttccagttcattgtttgagtatggttaaagtgatttttttctttgatatttgtggcatccagttttatacctgtcttttatctcttgcagttaatgacctacagtgtattccttaacagtcgctgaggactttgatatctggctcaacttttttctgttttctgtttctcttaccatcattcttggtgactatgtattcatattgttgaactacccaacaccttagccttacagtttattctatctgcactctggcattcttttatctttattctactttagcatcttgtacacctagacgcttcttggaccttgtcgtcacctagaactgatcacttc

SEQ ID NO: 1810 - DNA, 759 bp, Homo sapiens
  source 1..759: mol_type = other DNA
tcaaaaggaggagcatagtggccagccgtcagaagttgacaatgaccagttgagagcaatcattggagctgatcctctacaactacacaagaagctgccaaagaactcaatgtcaaccattttatggtcatttggcatttgaagcaattcggaaaggtgaaaaagctagataagtgggtgtctcatgaactgagtgaaaatttaaaatatcgtcattttgaagtgtagtcttctcttattctatgcaacaacaaactatttctcaagcagattgtgacatgcgacaaaaagtggatttcatacgactaccggcaatgaccacctcagtggctggatggagaagaagctccagagcacttcccgaagccaaacttgtgccaaaaaggctcatggtcactgtttggtggtctgctgccggtctgatctactacagctttctgaatcccagggaaaccattacatttgataagtatgctcagcaaatcgatgagatgcattgaaaactgcaatgcccgcagccggcactgatcaacagaaagggtccaattcttctctacgacaatgtccaactgtatgccacacaaccaatgcgtcaaaagtggaacgaactgcactacaaagttttgcctcatctgccatagtcacctgacctcttgccaactgactatgacttctttaagcatctcaacaactttttgcagggaaaatgcttccacaacgagcaggatgcagaaaatgctaagtgtttgtctaatccca

SEQ ID NO: 1811 - DNA, 1971 bp, Homo sapiens
  source 1..1971: mol_type = other DNA
attggaaattaaatgaacataggagactatttcactaaacactgatagatacacatagtggagtgctatgcagccataaaaaagaatgaggctaatccctatgaactaatctgaagcagtttccagggtgcactgataagaaagaaggaaaaatacaatgacatctggtatttgtgaggaacaaaaacaaacaaacaaaaaatgtaggaagtctaaaccagaaactaatgagattaatctcacatggggcaggatagatgagaaaagatgagggaaatgggaacagggtagaggagatgtgggaagtggcatttttttgaaggttttgtttttttgtttttgtttttttttggtgtattatagttctgtcctttagaaccatgtagacattccaaatgcccaacatattaataaataaataaacaaggatgaggtatggactcaaaacagaatagaatagaaagaataaacctgctttataagtgaataacaaaccacattaaaggagaatttggtgagaaaaatcctaagtaactttggaaaataatattttgactatatactctaaggctaaagataaaaacaactatacacaaatattacatgtaagttaataggtttgtttttcattgagtgatgagttagcaattctaaaacaactttatattttaggactgaggaaataagtaaatatggtaggaataatgaatgccagttttctcactgtcaaaagaattgcaagtatgaaaagaggaagaccagaatgaactccacggtgctggaacagaactggaaatatcaatgtaaactcaagattattaatatagagaaaaaataaagaaatagatgtaaatgtgtaattttcagttcactgggaggacctagaagcaatgactctctagtaccaataagcatacctagagttgagattttggtttctaaatgccattctccaattaaaaaggaatcaaagcacctcagataaatgtttaattccagggctggggcagggaaagtgaaagagaatcacagaacatcctgtaatgacagaaaaaagtcacaataaatggtgggattatgtcaaaaggacatgggattcaacttgaaagatcttccaatagccaaatctgagaaaagttaagcaacaaaaaaaataacaaaatcttataatctatagaaaaaatatgaatgtataaatccataatgatataaatatatttagaggagaagggaaagcacttactttcaggagaattccaactaataaatgaggaaggatcatagaaatggaaagatcaccatttggcaaatgctagagttataactgtttcagataagaattatcaatggatactaaaattaatggaagattatataaaggcaaaatatgagaatatttacacagacttgaaatatcatatgggcaaccacagataattatatattacaaagggaaaaaatagtaattttataggggaaaaatgtggcagataccaccttaaccaagtgatcaaggttaaaatcaccagttaaggggccaaatcatggaaattcactgaggacacatgactttgatgttttgctaaaaatgcctaacctgaatttaaccatgaaaaatgcaatacaaaaccaaaatgagagaggatatacaaaatactgacaagtatttgtcaaagtgttcataagttccagattaaaagtaactaaatgcaacatgtgatcctgaattgggttttagaccagaagaaagacatcagtgggacaactggtaaaatttaagtacagttaatagattttataatagtaatgcctgatttcctgattatattcatgttaatttcttaatcttgattattataatatggttacataggtatttgtatttgggagatcagggtgaagagcacatgggaattctttgtactagttgtacatcattttgttaactctgaccttatttcaacatgaaaa

SEQ ID NO: 1812 - DNA, 1938 bp, Homo sapiens
  source 1..1938: mol_type = other DNA
catcttcacctgggtaataacaagggctcccatcctctgccatgctgtcactagagacagtatgaggagcttggacatccactctcaactggcagtaatgaggtaccctgccctcatcctgctctgacatgacatcctgggtcatgtcagaggaggcctagtacagggtcaggactttaaccactacccagctgcgtgttatcaatggaggccacatctggccctgtggtatcgatggaggtaacatgaggagcaataataaattactcctacgcttcccatccagggaggtgtcagttgaggcctaatggggaaccagaactcccacccctgttcattatgggtatcatgagaagccctcccaccttgggtatcaacagaagtagagtggagaatcgggactactacctcctcgtggtagtaatgaggtggcaacaccacccatcccctaccatagcaatatcacaaaaagccagctaatacaaactttgtttaagatctggagtctcataacttaattccccaaatgtccaagtttccattgaaaattgcttgtcacaccacgaactaggaaggtctgaaactgaatgtaaaacacactaatagatgccaacactgagatgcagaggtgttagaattatttgacaaacatttcaaagcagccatggtaagaatgattcaatgaggaattataaacgtggttgaaacaaacaaacaaacaaaacccaaaagacttagcaaagaaacagagaataaagagaagaaaattggaaattttagaactgaaagagtgactaagaaagcctgagttgccaggctcaactgcagaatggaagggatagaggaaaaaactactgagcttaaaggtagaacattagaaattacccaatctgaacagactagagaaaatagatttaaaaagcaaataaacagattctcagtatcctgtaggactataacaaaagatctaagatttctgtccctgaaaggagaaaagagggcagggtgagaaggtaatggaagaaataatgactaaaaactttccaagtttggtaaaggcacaaacatgtagcttcaagaagctgaacacattcacagcaagagataccatagtcaggtttaaaaaaaaactataggaaaatcttgaaagcagcccaagaaattatatcttacccattggggaaaacaattagaaaactagctcatttctcatcagaaatcagaggccagaaggaagtggcacattatcaagtgctgaaagataaggactgtcaactcataattctatatccagcaaaaatatccttcaggaatgtaggggaaatcaagacattctcaaatgaaggaaaatgaaggaactttttgccagtagacctatccaaaagagaagtttgtctaaataggaagaaaacagtaaaaagaaggaatctcaaagtattaggaaggataaatgtacatggtaaacagaactgtgggtatatgtaatagacttccttttgcttcatgaattttctaaattttgtttggtggttgaagtaaaaattttaactctgatgtggttctaaatatatagagaaaatattttaggtaattatattataaatgagcaaggacaaagggatataaaaggaggtgaagtttctacatatcactcaaactgacaaaatgaattcagtagaccatgataagttacataaatataataactagaacaaccactaagaaagctatacaaggagatacatttaaaacattatagataaaatggaatcctgaaatatgttcatgtaacaggcaagaaaaagaaaacagagaaactaagagaagaaacagaccaaaatggcttaacgtatcaatcataataaatgtaaatggtctgaatacatgaattaaaatacagatatttacagtgtagatttttaaaaatgacctaactgt

SEQ ID NO: 1813 - DNA, 54 bp, Homo sapiens
  source 1..54: mol_type = other DNA
catgggaagaacagaagacagagcatgctcttttaagtctgataacatggtttc

SEQ ID NO: 1814 - DNA, 625 bp, Homo sapiens
  source 1..625: mol_type = other DNA
ttactttgttttacaattcccagcatctggcttctgctcctaccttactactgatgaaccagtagttcctgaattgctaaatccagtgggcttttaaattatttcctagatctctctgtgcatttgaccccattgatagctccctccctctgaaagttgcccattcccctggcttccactgtaccataccctctgggtggtcttctaattatgtctttttgcctccttcctggacttcccttcttcctcttcccctgggttcatcctcagcccgttgctcttgccctgtacacttttcctcagtactttcatccaccatcatggtttgtagctactcagacattttatttgtagtccagtctcttgtctgcagttcagactcaaatatccaactgcttgccatgtccaacaggcaccctccaacctaacgtgtgcaaactaacctcatcatcatcccccttaacgtagtttctcattctatgctttctgtctcattttgtggcactgctgtcgactcattcatctaaactagaaacccaagaatcacttttggctcttttttgcccacttttgttttccatatcaaacccagtaccaggaactgctaatttttcttttcttttct

SEQ ID NO: 1815 - DNA, 368 bp, Homo sapiens
  source 1..368: mol_type = other DNA
tgttatagaccgaatggtaccctcctacattcatataccgaagccctgaccctggcgtggctgcatttggagatagggtctctaaggaggtgattgaggttaaatgaaaccataagaatggagctccaatccagtagtgctggtgtccttgcaaagaagaggaagaggcatcagagatgcacaagcatggagaaaaggccatgtgaggacacagcaagaaggtggctgtctgcaaacctggaagagtgtcctcactagaagccatccatgctagcaccttgaactccagaaccatgagaaaataaatttctgtttttaagccacccaatctgtggtattctgttacggcagcccaagtagactagtat

SEQ ID NO: 1816 - DNA, 88 bp, Homo sapiens
  source 1..88: mol_type = other DNA
cgtaaatgcttctttcttatctatggctcccacaactatgtgagcttcttcaggacaggaatttggtcttagatatttttctatcacc

SEQ ID NO: 1817 - DNA, 270 bp, Homo sapiens
  source 1..270: mol_type = other DNA
agctctaacccacaatgtgactctatttgtagatggggcatataagggggtaattatgggtgggaccctaatacaagagagctgacgctttatgagaaaggaagagacacaagagccctctctctctctctctctgaggatgcagtgagaaggcagccatctacaagccaggaagagagtcctcactaagaactaaattggccagcagcttagtccttagactttccaatctccagaattctgagaggcaaatttctgttgttcaaacca

SEQ ID NO: 1818 - DNA, 110 bp, Homo sapiens
  source 1..110: mol_type = other DNA
gagaagcagcatggcaccctggtggcaggggctgatactcagccgggccagggtgctctcctgttaaccataaccaagctcacaggacatgggatgagcccactgtgtga

SEQ ID NO: 1819 - DNA, 294 bp, Homo sapiens
  source 1..294: mol_type = other DNA
gtcaagtgcagtggctcatgcctgtaatcccagcacattgggaggctgaggcagaaggactgcttgaggctaggagttcaagaccagtctgggcaacgtagggaaaccttgtctctaaaaaaaaaaagaaaaaatttaagtagctgggcatggtggtgtacgcctgtagtcccagctactggggagggtgagctggaaggatcacttgagcacaggaggtcaaggctgcattgagtcatgatggcaccactgcactccagcctgggcaacagagcgagaccctgtttcaaagaa

SEQ ID NO: 1820 - DNA, 651 bp, Homo sapiens
  source 1..651: mol_type = other DNA
gaggcaggagaggaaagagactgggtcctgcagacatgtgacaaagcaacacaggtcctgatggccctcacacatccgggcacgttccctcccccacttgcaccccttaacaagtagactgagtcacggagcaggaaggggtggaggtgctcctaaatctgctgaccaggctgaattcctgaccatacaaggaaggacctatctatctctttgagtgatgccttctgaggtcactgaaacaggactctggcattccctataaggacctgaccaggtccagctgcctgaagaccagagggactgcagcctgaccctcacgcctttctcctcatttgaatgtcatcgtaatattaaaatcactgcccagggtggggctcctctgccattttctggtcacccgatgcaagttaaagcatgaagtcccactgcgcaagcaaagaaaagacaaaggcctcacctgaacatgcatggacgtcactctgttcccacctcaccttcctgccggtgacacgctggggggctggtgtccagatccttttcccgcagctgctccgtgtgcccagccccagcctgtgagcccagcctgggaagaatccccagctggcctggtgtcaccatccactcacacaagagccaaagaactcaaggtcc

SEQ ID NO: 1821 - DNA, 233 bp, Homo sapiens
  source 1..233: mol_type = other DNA
tctacactttattataaaataaaatcggctttgtgtttgattttgcctaagagtggaggcttctgagtatgttaaggaaggctagagtgagccataatgtttagtagcaggtgtattaaatgtattttcaatttaagatggttttttaaaagaaatttttttttaaccaacaaagcaaaggcaaataaaataagtttattgggatgtaaccctatcataaattgaggagcatc

SEQ ID NO: 1822 - DNA, 270 bp, Homo sapiens
  source 1..270: mol_type = other DNA
gccgggcacagtggctcacacctgtaatcccagcactttaggaggccaaggcgggtggatcacgaggtcaggagttcgagaccggcctgagcaacaacgtgaaaccctgtctctactaaaaatacaaaaattagccaggcatggtggcaggcgcctgtagtcccagctactcggaagactgagacaggagaattgcttgaacctgggaggcggaggttgcagtgagccgagatcatgccactgcatcccagccggggcgacggagcaaaa

SEQ ID NO: 1823 - DNA, 212 bp, Homo sapiens
  source 1..212: mol_type = other DNA
caagcttttccaaccccggcccgcacgtggcacaggacggctttgaatgtggcccaacacaaattcgtaaactttctggaagcattatgagattcttttttgcgattttttttaaagctcatcggctaccttagtgtttgtgaatttcatgtgtggcccaagacaattcttcttccgatgtggcccagggaagccaaagattggacaccctt

SEQ ID NO: 1824 - DNA, 4543 bp, Homo sapiens
  source 1..4543: mol_type = other DNA
ttttaaaaatttttcagggtcccagaaggcaaagagaagacaaaagagatcgaaaacctatttcatggaataatagctgaaaacttcccaagtctagcaagagattaacacatccagatacaggaagcttagagattcccaaacagattaaattcaaaaaagcattcttcatgccacattattgtcaaactgtcagaagtcaaaagtcaaagagagaattctaaaaacagcaagacaaaagtgactagtcacttaaaagggaaacttcatcagactaacagcatattctcagcagaaatcttacatgccaggagggaatggggtgatatattcaaaatattgaaagaaaaaaaaagaaaaaaaaactgccaacaaaagattctatacccagcaaaattattcttcataaatgaaggagaaatcaagactcccagacaagtaaaagctgaggaaattcatcacctctagaccagccctgcaagaaatacttaaaggagtcctatgcattgaagcaaaaggatgaaatctaccatcatggaaatacactaaagtataaaacccactggtaaagcaaacacagaaaaccaccaaaccataatgacaaacaataagagagaaagaaaggaacaaaggatatacaaggtaaccagaaataaattaatagaatgataggaataagccctcacatatcaacaacaaccttgaatgtaaatggattacactttcctcttagaagatagagactgcctgaacagatttaaagaaaaaaaaacctgatccacctatatgctgcctacaagaaactcatctcacctgtaaagacatacagactgaaagtaaagggatggaaaaaaaaagatattccatgcacaaggaagccaaaaacaagcaggactagctgtgcttatatcagataaagcagattttaagtaaaaaaacagtacaaagaaacaaggttatcatataatgataaagggatcaattcagctagagtaaacaatgattccaaacatatatggacccaacactggagcatctgaggtataaagcagatcttattacatctaaaaggagagataggcacgaatacagtaatagctggatactccaacattagatagatcatctacatagaaaattaacaaagaaacattgtatttaaactgcactttagaccaatggacttaagagacgtttgtagaacatagcatccaacagctacagaatatgcattcttctcatcatcacatggaaccttctccagttccatgtggttatgtttggacagaaaacaagtctcaacaatttttgaaaaattgaaatgtcagatatcttctcaggtcataacacaataaaactagaaatcaataacaggagaaactttggaaactaaaaatacagggaatttaaatatgctcctgaatgatcattaggtcagggatgaaattaaagaggaagtccaaaaatttcctgaaacaatggaaaatcaaaacacaacataccgaaatctatggaatacagcaaaaacagtgctaagagtgaagtttatagcaataaaaatctacatctagaaagtaggaaggtttcaaataaataatctaacaatgcaccttaagaaactagaaaagcaagaacaaaccagtcccaaaatgagtagaaggaaagaaataatgaagagcagacagaaccaaacaaaatgcagaataaaaaatattcaatggatcaatgaaaagttggctttttgaaaacatagggaaaaccagtaaactactagctagactaaccaagaaaaaaaaacaaaagacaaaaataaataaaatcagaaataaaggggacattacaactgaagtccaggaccagatgactttactgctgaattctaccaaacttaaaaagaataatcaataccaattatctttaaattattccagaagtttgaagtggagagaattctccctaattcattctatgaggccagcattatcctgacaccaaaaccagacaataatgtaagaaataaagaaaattacaggccagtatcccagatgaatatagacacaaaagtcctcaacaaaatactagtaaatagaacccaatagtacatcaaaaaaaattacaccatgattaagtgggatttatcctggagattcaaggaaggttcaacacctgcaaatcaacaaacataatacaccacatcaacagactgaaggacaaatgttatatgatcatctcaatagctgcagaaaaagcattttaaaaaattcaacatcccttcatgataaaaactctcaacaaactaggcataaaggaacatacctcatcataataaaggctatatatgataaacccacagctaacatcatactgaatggggaaaagctgaaagtctttcctctaagatcaggaataagataagcatgcccacttccaccactgctatttaacatagtactggaagtcctaactaggacaatcgggcaacaaaaagaaataaaaagcatctaaattggaaaagaggaagtcaaattgtccctctttatagatgacatgacatgatcttacacctagagaaacctaaagactccaggaaaaaacttttagatcttataaattcaataagattgcaggatacaaaatcaacatacaaaaatcagtagcatttccatacaccagtaatgaactagctgagaaagaaatcgagaaggcaatcctgtttacaatagctacaaaaaaaagaaatacctagtaataaatttaaccaaggaggtgaaaggtgtctacaaggaagactacaaaactctgaggaaagaaattgaagacaccaacaaatggaaagacatcccgtgctcacggattgaaagaataatcgtagttaaaatgattatacccaaagcaatgtatatatccagtacaatccctatcaatactaatgtcatttttcacagaaaaaaaaaagtcctgaaattcctgtggaacccaaaaacagcctgaatggccaaagcaatcctgagcgaatagaacaagggtggaggcatcacactacctgagttcaaatgatgttacaaggctgtagtaaccaaaacagcatggtatcggtattacaacagacacatagaccaatggaacagaatagagaacccagaaattaatccacatatctatagccaactgatttttgacaaaggtgccaaggggaaaggacacctcttcaataaatggtgctagaaatattagatatccatatgcagaagaatgaaacaggacccctatctctcaccatatgcaaaagtcaactcaagatggattagacgtaagcatatatcctgaaactataaaacttctagacaaaaacataagggacacacttcagaacgttggtctaggcaaagatttcatggctaagacctcaaaagcacaagaaacaaaaatagacaaatgggactctatgatatttaaatgcttctacacagcaaaggaaacaatcagcagaatggagaggcaacccattgagatgtgtaaaatatttgaaaactattcatctgacaagggactcgtatctagaatatataagaaactcaactaaaatttcaaaaccaaataatcccattaaaatgggcaaaggacctgaatagacatttctcaaaagaagacatacaaatggccaactggtatatgaggaagagctcaacattactaatcattaaagttatgcaaatcaaaaccacagtgagatgtaatgttatcccagaatggctattgttaaaaagattaaaaataccaggtactggtaagggtgtggaggaaagggaactcttatacaccgttggtgggaatgtaaattactatagctactgtggaaaacagtatggtgatttctcaaaaaactaaaaccagaattaccatatgacctagcagtctcactactgaacatttattcaaaggaaaagaaattagtatatcaaaaacgtacctgctcctcatgtttcttgcagcactattcacaataacaaggataggaatcaacctgtccgtcaataaattaatggataaagaaaatgtggtgtatatacacaatggaatactgtttagccataaaaagtagtgaaattatgtcatttgcagcaaagtggatggaacgggaggtcattatgttaagtgaaataagccaggcacagaaagacaaatattgcatgttcttatatgcgaaggctaaaaatgttgatgtcatggagatagagaatagaatgatagataccagaggctgggaaggtggggtgggggtgatgaaaagagattggtaaatgagtacaaccatatagctaaatagaaggaataagatctgatgttctatagcacagtagggtgactatagttaacaattagtgtattgtatattgcaatatagctagcagagaggacttgaaatgttcccaacaggtgataaatactcaaggtgatggataccctaagtaccctgacttgatcattacacattctgtgcatgtaacaaaatatcacatgtatcccataaatatgtacaaat

SEQ ID NO: 1825 - DNA, 29 bp, Homo sapiens
  source 1..29: mol_type = other DNA
ctccttcatttgcaggacatcaagggctc

SEQ ID NO: 1826 - DNA, 137 bp, Homo sapiens
  source 1..137: mol_type = other DNA
tctgcaaccttggataaattatttcaatctttattttgtaaaacggagataacggcctataggattgttaagactgaatattttaaaagagcttagaatggtgcctgacaaatgagaaacaataaatactgattatt

SEQ ID NO: 1827 - DNA, 303 bp, Homo sapiens
  source 1..303: mol_type = other DNA
gccgggtgcggtggctcacgcctgtaatcccaacactttaggagtccaaggcgggcggatcacttgaggtcaggagttcaagaccagcttggccaaggtgataaaacccgtctctactaatacaaaaaaaattagctgggtatgttggtgcaggcttgcaatcccagctacttgggacgctgaggtgggaggatcgcctgaacctcagaggcagaggttgcaatgaagcggaggttgcagtgagccgagagcatgccgctgcactccagcctgggagactgcatctcaaaaaagaaaaataaa

SEQ ID NO: 1828 - DNA, 5063 bp, Homo sapiens
  source 1..5063: mol_type = other DNA
gggaaaggaacagaagaaatatttgaaacaataatgacttagaattttcccaagttaatgccagacaccaaactgcagatccaggaaactcagagaacaccaagcaagataaatgcccaaaaatgacaccaagtatatcatttgcaaattgcagaaaaacaaagaaaaaaccctccaagaaactagagggaaaaaaacgccatatgtacagaggagcagagataagaatgacatctgacttttactcagaaatcatgcaaggcagaagagagtgcagtgaaacatttaaagtattgagaaaatagcacctaaaattctgtaccctgagaaattttccttcaagagttaaggacaaataaagactttctcaatcaattgagggaatttgttaccagtagacctgccatgtaagaaatgttaaaagaagttctttagacagaaggaaaataatataggtcagaaacatggatctacataaaagagcatcaaagaagtgctaagtgaaggtaaaataaaaactttaattttcctattcttaattgatgtaatagatgatagtgtgttcaaactaataatagaaacaatgtatttgattgagtatgcttgtgtgtacacacacacacacacataagtgaaattaattacagcaatgatacaaagggtgaggaggaggaattagaattattttgttgttataaggtattcacactatctgtgaagtagtacagtgttagttgaaaggaggcttggactggttataaatgtatagtgcaacctctagggcaaccgttaaaacaagtataaaaagaagtataactgatatgctaagaaaggagataaaatgaaaccacataaaatgctcaattaaaactacaaaagggaaaatgtggaagacagaaataagaacaaataagaaggccaagaaatggaaaacagtaatatatatggtaactattagcccaactatatcaataatcattttcagtgtcagtgatctgatgtaccaatttataaacattatcagagcaggtcaaaaaacaagatccaactctgtggtctacaagaacccacttcaaatatgaagacacacatagatgaaaagtaagtggatggagaaatatataccatgctaacactaatcagaagagcaggagtagctatattaatttcagacagagcagacttcaaagcaaagacagatgtcagggataaagatggacatcatataatcataagggagctaattgtctaagaaattataataatctttaatgggtatgcccctagcaacagagaatcaaaccatgtgggacaaaaactgatagaactacaaggagatatagataaatccactactgtagttggagacttcaacactatcagaaatggacagattcagcaggcagaaagtcaatatggacatagttggactcaacaccatcaatcaactggatataactgacacctatagacaacttcattcagcaacagcaaaagacacattattcttaagctgtcatggaaaattcaccaagctagaccacatatggggccataaaacacaccttaacaaaggtaaaagcatagaaatcgtatagtgtctgctgtcagatcacaatggaataaaactagcaatcaataacagaaagatagctggaaaactctaaaatacttggagattaagaacacacttctaaataacacatgggtcaaagaggatattgcaagataaatttaaaaatattttgaactaaatgaaaatgaaaacagaacttgtcaaaatttgtgggatgcagtgaaccagtgctcagggggtactgaaggcacatattagaaaaaagaaagagccaaaattggtgatctaagcttataccttataaaactagaaaaagaagaacaaattaaattcagagtaagcagaataaaataaataactattaaagcagaaatcaatgaaattaaaaacagaaactctggagagagtgaagaatcaccaaaaggtgattctttgaaaaaattcaataaaactgatggtcctctaactaggccaacttagaaaataagggagaggacacaaagtactaatatcagtaatgaaagcatggacatcactataggaacattagaaatgctgtgaacaactcagtgcccacacatttggtaacctagatgaaatgaatcaattccttgaaagacgcagtctgacaaagctcacacaagaagaaatccacagtctgtataggcctatattgactgaagaaattgaatcaataattcataaccttccaaaacagagagcaccaagttaaagtgaatttactggtgaattctaccaaaaatgaagaagaaattatactcattatccacaacttcttccagaatatagcagagaaaatactttctaactcattctgtgaggccagaaatcaccctaatgcctaaaccaaagactttacaaagaaactatagaccaatatctctcatgaacaaagatacaaaaattctcaacaaaatattagcaaattgaatccaacaatgtatattaaaaaaatcacacactgtgacaaaatgggatttatcccacatacacaaggctggttcagcctttgaaattcagttaatgtaatatgtcacatcagtgggctaaaggggaaaaaaatcacatatagcagtaagtgcacaaaaagcatttgaaaaatctaacacccattcatgattaaacaacaacaacaacaaaaacctctcagtaaactaggaatggaaaggaatttcctctacttggtaaagaatttctacaacaaccacaacaaaaccaaaactctagagttgatatcatacttaatgatggaaactagaagctttccactaagatcaggaacaaggcaaggatgttccctttcaccactcattttcagcatcatacaagaaatcctacctcatgcaccaagacaaaataaaaaaaaagaaataaaaggtaaactgatttggaaggaagaaataaacttctccttgttcacatatggcataatcatctatgtagaaaatgcaagagaattaacagaaaaactcctggaatgaataagcaattatagtaatatttcaagatacctggttaatgtacaaaagtcagtaactttcatatatactgtcagtgaacaagtgggatttgaaattaaaaacacaatataatttatattagcaccccccccaaaataaaatacctagggataagtctaacaaaatatgtacaagatctttatgaggaaaattacaagactctgatgaaagaaataaaagaagaactaaataaatggagagatattccatgtttatggagaggaagattcaatattgtcaagatgtcagtgtttctcaacttgatttatagattcaatggaatcccaatcaaagtcccagcaagttattttgtagatattgacaaactgattctaaagtttatatgtagaggcaaaagacccagaataatcaacacagttatttagaagaaaaagttggaggattgacactacccacatcaagacttactgtaaacatatagtaatcaagacagtgtggtattgacaaaagaagagacaaaccaatcagtggaacagaatagagagcccaggaatagacccagctaagtgtagtcatctggtctttgacaaagtagcaaacaacatgatggagaaaagatagagtcttcaacaaatggatctaaaacaacttgacatccacatgcaaaaaatgaatctagacacacctaactcaaaacaggtcacagacctaactgtaaaatgcaaagctataaaactcctagaagattttctctagaagaccttgggtttggtgatgactgttttatatgacaccaaaggcacaacctatgaaagaaagaattaataagctagacttaattaaaattgaaaatttccactctgcataagacactgttgagagaatggaaatacaagccagaaattggtggaaaacatttgtaaaagatatctgaaaaaggactgttattcaaaacatacaaaaaattcttaacactgagaaaacaaacaaatccaatttaaaaatgggtaaaagaccttaacaaacacctcaccaaagaagatacacagatggcaaataagcatatgaaaagatcctccatatagtatgtcatcagggaaatgcaaatttaagcaacgcgatatcaccgtacacctattagaaatccagaatccagaatccagaacacagacaacattgaaggctgttaaggatgtggagtaacaggagttctcattccttgctagtgggaatgcaaaatggtacagccatttggaagacaacttggcagtgtcttacaaaactaagcatactcttattatttgatccagcaattgagctacttagtattttatcaaaggaatggacacttaacgcttatacagatacctgcacacagatacttatagcaggtttgttcataattatgaagacttgaaagcaacccagcggtactttagtaaggggtgggtaaataagctgtgatccctacaatggaatattactctgcactagaaggaaataagctatcaagccgtgaaaagacatagaggaccttaaatgcacattaccaagtgaaacaagccaattggaaaagtctgcttcctgtatgattccaactatacgacattctagaaaaggcaaaactatggaaacagtaaaaagatcactggttgccatgggtaagggtgagggagggatggatatgtgggcatggaagatttttagggcagggaatctactctgtgtgatactgtaatggtggatgcatatcattctgtgttgttcaaactcacagaatataacaccaagaataaaccctaatgtaaacagtggaacttaggtgacagtgatgtgttcatagattgtaaaaaatgtatcattctggtgcagggtgctgataagaatgagcctttgtgtgtggcgggggagggcggggcatgtaaggactatctctctaccttcctctcaatttcgttatgaacctaaaaactgctgtaaaaaat

SEQ ID NO: 1829 - DNA, 2037 bp, Homo sapiens
  source 1..2037: mol_type = other DNA
tcaacaaaatcaaggctaaaaatcataggactatctcaacagatacagaaaaagcctttgacaaaattcaacagtctttcatgataaaaactctcaacaaatatggcatacaggaatgttcttcaacatagtaagaccatatatgacaagtccacagctaatatcatacccaatagtgcaaacctgaaagcttttcctctagcatcagaaataagataaggatgtccactctcaccacttccattcaacataatcctggaagtcctagaaagagcaaatgggcaagagaaagaaagaaaggcaaccgaatcagaaaggaagaagttaaatagtctgtttgaaaatgatgttatctaatatacagaaaaccctaaagactaccataaaactgttagaactaataaacaaattcagtaaaattgcaggataaatatcaacatggaaaaatcagttgaatttattttcttcagttgcatttctagacactaacaatgtactatctgaaaagaaatcaagaaaacaatcaaatttgcaaaagcatcgaaaagaataaaatacttaggaataactttaatcaaggaggtgaaagatctgtacactgaaacctataaaacattgatgaaagaaactgaagaagacacaaataaatggaaagatatcctataaacatgaattaggagaatatcattaaaatgtccatactactgaaagtcatctacagattcaatgccatggctattgaaattccaatgaaatacaaaaaaaaaaaaaaccctaaaattcatatagaaccataaaagattccagacggacaaagcaatcttgaaaaaaaagaataaagctggagacatcacactacctgatttcaaactatattacaaacttatggtaatcaaaaccacatattactggtataaaaacagacacatagaccaacagaatagaatatgaagcccagaaataaacccatgcatacacggtcaacttaacttcaacaaaggcaccaagaatggggaaaggatagtctcttaataaatggtactgggaaaactgaatatccacatgcaaaataataaaattggcctcctactccaaaaatcaactcagaatgaattaaagacttaaacttaagacctggaaccataaaaaccgtagaacaaaacatatgagaaaagctccttgacactggtcttggcaataagttcttggatataacactaaaagcgtaggcaacaaaagcaaaaatagacacgagactgtatcaagctaaaaggcttttcatagcaaaagaaacaacaaaataaggtaacccatggaataggagaaaacatgtgcaagtcatataacaagtaaaggactaatacccataatagatgaggatctcaaacaactcattagcaaaaacaaacaaagccctcaataaacaaataactcaatcacaaaatgtacaaaggaactgaacattttttcaaagaagacacacaaatggccaagagatatatgaaaaaggtgctcaacatcaaaattctcagggaaatgcaaatcaaactcacagtgagataccacctcacacctgttaggatggttattatcaaaaagaccagaggttacaagcggtggtaaggatgtgcaagaaaggagaccctcacacactactggcaggattgtgaattagtacagcccctgtggaaaacagcatggaggcgcctcagaaaactaaatatagaactaccatatgatacagcaatcccaatactgggtatatatccaaaaaaacgaaatcaacacctcaaaaagacgtctacacccccttgttcatggcagcactattcacagtagccaagatacgcaattgacctaagtgtccctgaatggatgaatggataaagaaaatgtggtgtatacacacacaacggagtactattcagtcatgaaaaggatgtcctgtcatttgcagcaacactgataaagctggaggatattatgctgagtgaaatgagccaggcacagagagacaaataccacatgatctcactt

SEQ ID NO: 1830 - DNA, 260 bp, Homo sapiens
  source 1..260: mol_type = other DNA
atacaatcattaaaaatcatgttgcgaaataatacctaaaacatgggatataatttctaaaagtcaaaagaaagaaaacatggcatgactccaattttgtaaaagaaaaaagaaacacatgtatagaaaaagactaaagagaaatacactaaaatgcatacaacggtttctctgcatggtgaaactatagatcatatttcattttaattttttcctgtaacttccagatataataagcatgtcttattttataataaaaa

SEQ ID NO: 1831 - DNA, 307 bp, Homo sapiens
  source 1..307: mol_type = other DNA
agcatgaagagactcccactggtcaattttggtgtaatttaaacagtaaggcataatcactgtcattcatttcaatatactgaatatacaaaaatctatgaaaatgataatttgccacaactgcatgggactattatattgattttttactttgaaaattgctaattaaataaaaagaactgagcatttatcctaccttttttaggaagaactgtaatcatccccagttgatgaggagaagctcttctgtagagaagaatgacagctaataaacacaaaagaaaagtaaaagtaattagaaaatcat

SEQ ID NO: 1832 - DNA, 2009 bp, Homo sapiens
  source 1..2009: mol_type = other DNA
tttatatctgaaatgcccatgctgttttgggtgatgtcagaggaacactttagtaagggaggcaatgcccattccattatcaaacagaatttatacatgatcgtgctacctggggaatgcaaggaggagatcctcacaaacagagggactcttttcccctaaaactgactctggaactatgtgaggagccactggattctacactaccctgtaagcagctcttgactgaccaaccaagagctacttggtttgaggatggcaattcaataccagggtaaatgaataccatcctgtttggaagtctgctattttgaccaaaggaggtaaaaacaaataatctcagtgggctgtattggatgcattttcctaacagtaatggaagaattgaacagtggtagaaacacttgtgtttaggattttactaactcataggcagtgaccaattgcctgcccatacagttaggcaagagggcaatggatacttggcctattaaaaggatgcccatatgaagcatggccccatggacatttgaggggtgcattaaagtagaacaagtcaatgtcaatcagaagagcccctttccaggtttggaaggtgaatggaattgacaagcaggtatccctgtggacttccttgaggtggtcacctggatccatgaaattagtggatatgggggtacggcagcaggcagagatgggctgaatctagacatgttccttttgcatcctctcaggcacaaaatgccaataagaactgttctctccaccagaaaaaaaggcagagactgataatggctatggggcagattccctggtgcaaaggtcctaaacaaagctggcaatacagagactggtgctagtggccctatggggctacaaatgggtcttgacaggaatagacaatgactctggcatggcttttgcttactcagtggaacatgcaaatactctgagtaccattaaaaaaacaactaaacagaagatattgcatggatttgtatggccaatcgtcatttcttcagaccaaggaacacactgtacagcctatgatgtccaacaatgggcacagagatagtctcctcagagtcatagtttgatagatgaatagaacaggtaattaaaacactggaaacataaaaggctggcttacatgccttcaagagtgtgtgctcatactcaacatgagtgggactaaaggagtctgcccactagatgttcctgtttttctaaggctggtctggagaagaaggggtgaagaggatgctcgggtgactatgcaaatcttgccaaggcaggagtacgttggaataatgatcattttttctttcttccctaaatcagatcactaaaaccttttctttccctcctacttgacgtagtggccctaggaccaggcctgcaactgccagtgctggaagcagggctgatttctaagcaaaaaaccataactatgtttttaaagcttatgtcaaaattccttagggcctgatgtgactgtgttgctccttcaccccgcttagcaaagctggggctaagagtgaatgcagctatattgcctggtggtaaaaataacccactagctttgcacctacataactttaccctatctgcatgggagtaggctgaggagaaggtacctgctagactagcattgttgcctgcagtctaaaccagaacggtagtgattctgatgtctcttccaaaggtggaaacatttgggtattaacggagagaaagagaaatagtagttgagggtaaaggaatgaataatgggttataaattgagggaaatccaacattacattaacaccttgaaagacccttagagaaacagatgacattgtctctcagctcaattataacagatatctaaaaaggtaaagctatttgtttgccaagaccgctccagctttggaacctgacaagattgaagggaagcctgcaaacctgagtggactcactctgggaaacattaatacaatatagtggactagactagttattaatga

SEQ ID NO: 1833 - DNA, 87 bp, Homo sapiens
  source 1..87: mol_type = other DNA
ccctgtctctgctaaaaatacaaaaattagctgggcgtggtggtgcatgcctgtagtcccagctactcgtgaggctgaggcaggaga

SEQ ID NO: 1834 - DNA, 640 bp, Homo sapiens
  source 1..640: mol_type = other DNA
gcttatacattgctggtgggaatggagattagttcagccactgtggaaagcagtttggagatttctcaaagagcttgaaagagaattaccatttgacccagcaatcccattactgcgtatatacccaaaggaatataaatcattctactaaaaagacacatgcacacgtgtgttcatcacagtactattcgcaatagcaaagacatggaatcaacctaaatgcccatcagtggtaccctagataaagaaagtgtggtacatatacaccatggactcctatgcagccataaaaacgacaagatcatgttctttgcagcaacatggatggacctggaggccatcatcctaagcgaattaatgcaagaacagaaaaaccaaatactgcatgttctcccctctaaatgagagctaaacattgagtaaacatggacacaaagaggggaacaatagacacttaggcctacttgagggtggagggtagtaggagggtgaggattgaaaaactacctatcaggtattatgcttatcacctgggtcacaaaataatctgtataccaaactcccatgacacgtaatttacccatgtaacaaacctgcacatgcaccccctgaacctaaaataaaagttggaaaggaaaaa

SEQ ID NO: 1835 - DNA, 114 bp, Homo sapiens
  source 1..114: mol_type = other DNA
gtccagggcccgcccaattcccatggaaccagaatctttgagagtgccgcccagaaatccgtgtttttcaaaagctctccagatcccagtactcagcgggaacttggaaaccat

SEQ ID NO: 1836 - DNA, 1464 bp, Homo sapiens
  source 1..1464: mol_type = other DNA
aggatgggtttttaatgctgataaatatgccctattctggaagaaaatgccacaaaggacatttattagtaaggaagaaaagcaagcaccaggatttaaggcaggaagagataggcaaactctactgttctgtgcaaatgcagtcggtttgctgcccttagccataaagctgctaatccctgagcctcaaagggaaaaaacaccagcagccagtcttttggttgtacaacaagaaggtatgaacgagaatgctttttctggattggttccatcaatgctttgttcccaaagtcaggaagtaccttgccaataagggactgccttttaaagttcttttgatattggacaatactcccggccacccagaaccacaagttcaacaccaaaagcactgaggtggtctacgtgcccccacacaatgtctttatttcatcctctgtattagggtcataaggacctttacagctcattatacattgtactctgtgggaatgactatcaacgctgtggaagagaaccctgatagaataacatgaaagtctggaagaattacaccactgattatgccactgttgttacagaaaaagctgtgaatgccatcaagtcttaaacacattcctggagaaaactgtgtccagatgatgtgtatgacttcacaggatttatgacagagacaatcgaggaaatcatgaaagagactgtggttatgacaaaaaaaggtatggttggggaaggccgaagggtttcaagatatggatctttgagaaattcaacagctaacagacaccacaccatagaaattaacagacaacttgatcgagatgatcggttctgcactagtgccagatgatgaggaagacaacatagaagcagtgccagacatatactgctggcactgacattagagagtctggcagaagggttgcaattattcaagactacttttgatttcttttatgacatggactcttctataatatgggcactgaaactaaagcaaaaggtggacagacgattgttaatatataaaaacactttttagaaaaataaaaaaagcaaaaaagtcaggcagaaattacgattatttctgtaaagttacaccaactgtgcctggcctttcctgcctcctctcccacctcctccacctcttccactccagagacagcaaaaccaaccccttttcttcctcagcctgctcaatgtgaaaacagtgaagatgaaggcctgtatgatgatccacttccatttaatcaatagtaaatatattttctttagcttactttaatatggtatatgatatgcataacatacagaatatgttattgactttatgttattggtaaggcttctggtcaacagtaggctatctgtagttgagttttagggaagccaaaagttatacatagattttcaactgcatggggattggcgcctctaatcctcacattgttcaagggtcaattg

SEQ ID NO: 1837 - DNA, 222 bp, Homo sapiens
  source 1..222: mol_type = other DNA
gtacagcgtggtagagaactccagggctgctgaatctgacagatgtggattcatccacttctgtgccacctgtgctgtcttgggcaaattacttaacgtctctgagcctaggtttcctggtcttcaaaacgagaacagtaatagttcctacctggtaaagttgttccgaggcttaagtgcgataacccctgtaaagcgctggagaacggcaaaagctctaca

SEQ ID NO: 1838 - DNA, 296 bp, Homo sapiens
  source 1..296: mol_type = other DNA
gccgggcgtggtggctcacgcttgtaatcccagctctttgggaggcgggcagatcatgagctcaggagttcgagaccagcctggccaatatggtgaaaccctgtctctactaaaaatacaaaaattagttgggcgtggtggtgcgcgcctgtagtcccagctactcgggagactgaggcagaagaatcgcttgaatccaggaggcagagcttgcagtgagccgagatcatgccactgcactccagcctgggcaacagagtgagactctgtctcaaaacaagcaaacaaaaaaaaaa

SEQ ID NO: 1839 - DNA, 301 bp, Homo sapiens
  source 1..301: mol_type = other DNA
gcgcggtggctcacccctgtaatctcagcactttgggaggccgaggcgggcagatcacgaggtcaggagatcgagaccatcctggctaacacgatgaaaccccatctctactaaaaatataaaaaattagccgggtgtggtggcgggcgcctgtagtcccagctacttgggaggctgaggcaggagaatggcttgaacccgggaggcggagcttgcagtgagccaagatcacaccactgcactccagcctggacgacagagactccgtcacaaaaaaaaaaaaaaaaaaaaaaaaaaaaaa

SEQ ID NO: 1840 - DNA, 2340 bp, Homo sapiens
  source 1..2340: mol_type = other DNA
ggcgatcatggaggatgggaggcagaactagattgcagctccggacagagcagcgggtgggggctcacattgtgaatgttagctccagagaggacccacagaccttttgaaggaagtggactcctcctgcaggacctgggagatccccccaaaactatgagtgccccaagtatggaactgggaaaggaagatcctcctctcccgaacacacacacccactggagaagcagaaggtctgtttgtgggagaagtttccaactttacctggagctgagtcaatttggagagctgaacgaaatatagatgtagaagaagcagcagaaaggccctgggagctccctgggtcccctagcaggccattcctgcctggcaccacaaggatccaatgggacaggagcagggggtaaaactacagagggagaaggaaatctccagctgaatttagtaacaattagaacgggatgagaagcctcctggccaaaactccagggagggcgcaaatccggtgtgcaaactccacaggtggggtaagacccaagctggtttctttcacagctgggaggtggtagcctggggcaggttttccagcctgtattgctttctgcctggaaacagactgggggcttttgggaggggcacggtgggagtgagaccaaccctttggtttgtgtgggagctcagtgaggcctgtgactgctggctttcccccacttctctgataacctgcatggctaagcagaggcagccataatcttcctagatacacaaccagtgacctgggaatctcactcccattccccatagcagccgcacaaagaccggccaaggagaatctgagctcaaacatgcctagccctgcccccacctgatgttccttccctacccaccctggtagtgaaagagaaagggcaaataatcttgggagttctagggccctcccactgccagttcctccccatacaaccacagctgatgctctctggaaagtgccacgtcatggcaggaggccaaccagcacaaaaataaagcattaaaccaccaaagctaagaaacctcatggagtccattgcaacccctgaaacctggaccagaacaggctctggtattcaaggctgagagaaccatagatggttcacatcacaggattctgggcagataaccccagtaccagcccagagctgtgtagactcgctgggtggctagacccagaagagagataacaatcactgcagtttggctcacaggaagccacattcacaggaaaagggacagactactacatcaagggaacaccccatgggacgaaagaatctgaacaacagcctccagccctagacattccctctgacagagcctatccaaataagaaggaaccacaaaaccaaccctggtaatatgacaaaacagggctctttaacacctcccaaaaatcacactagttaaccagcaatgggtctaaaccaagaagaaatccctgatttacctgaaaaagaattcaggaggttagttattaagctaatcagggagggactagagtaaggcaaagcccaatgcaaggaaatccaaaaaattatacaagaagtgaaggaagaaatattcaaggaaatagatagcttaaataaaaaacaataaaaaattcaggaaactttggacacacttttagaaatgtgaaacgctctggaaagtctcagcaatagaactgaacaagtagaagaaagaaattcagggctcaaagacaaggtctttaaattaacccaatccaacaaagaaaaaagaataaatacgaacaaaccctcctagaagtctgggattatgttaaatgaccaaacctaagaataatcagtgttcctgaggaagaagagaattctaaaagcttggaaaacatatttgcaggaaaaatcaaggaaaacttccctggccttgctagagacctagacatccaaatacaagaaacacaaagaacacctggacaattcataacaaaatgatcttcgcctagacacactgtcttcaggttatctaaagttaagatgaacgaaaaaatcttaagagctatgagacagaagcactaggtaactcatagaagaaaacctatcagattaacagcaggtttctcagcagaaacccgacaagctagaacagattggggcccaatcttcagcctcctcaaacaaagcaactatcagccaagaattctgtatccagtgaaactaaacaccatatatgaaggaaagatacagtctttttcagacagacaaatgctgggagaatttgccactaccaagccaccactacaagaactgctgaaaggagctctaaatcttgaaacaaatcctggaa

SEQ ID NO: 1841 - DNA, 107 bp, Homo sapiens
  source 1..107: mol_type = other DNA
ccaagcatgatgcatatctttaatcccagctacttgggaagcagtggtggggtgattgagcccaggagttcagggctagcctggtcagcattgtgcgaccccatttc

SEQ ID NO: 1842 - DNA, 2329 bp, Homo sapiens
  source 1..2329: mol_type = other DNA
gacatcagcaaaatagaagaataggaagtcttgggctgcaatctctaccaactgccccaatcccccatgccacccaacacccacagaaagtatagctagcaactatataaaaaccacgcatctttttgaaaaccttgatacttggcaactatcttgagacacccacgtcatttgtggaactgaatgaaaataaattagatgagtaggaattacctcactatgatgctgtccttcatcccctctgaagtcagcacaatgccagacagaggatttccctgggcccacagtttctacattgggggaaagaaaactggaggcatccaatcttccctagcattctgagacacttcccagaaagcccacttcagtctcaactcatggggaacaatggggctaaaggcatacctaaactgcctgaggtcagatagaaacaaaggaggtagagctcttagtgaccagcctacagatctcgctggtatttttgtgttcttgacagctcaatcagtgataccagctgactttataaccactctttaaaactgagctgattgccttcataagtaaggtaagaagttcattttactttgagtctctagatagctaatctccatactttgcctcagagcatgacctaatgaccctgcccaggcagggacactcccacccccatacattttggggaagtatagaggctagacctgcttgacctgagccatcaaatggccactcagccaaaagctcaccacaggcctccatctgagtgagaggcaatcctcagtcatgtatttccaaggagcatagcttctgatcctgcctgtcccaagcagtgactgactaatctcagagcacagcccttagccctgctcaactgcagatcccatacagtagaatttcctggccaggaaatacatctgcttcctagcctgaatagaagggaaagcagtatccagccagcagctcttcctgacagcagaatcttgccagcaattctggatggcagaactcagctagcagccccacctgacattacagcaaagtcagtgaccccatgaattagagaacacataacaagatctgcctgcctgggattgtcaccaactggcctttccagagtcactggctagtttaaatagcaagggtctattcctgccaaataacacttaaaaagatcagaagaggaggccgtctcctcaaattcacagaaaacaatgcaagcacacaaggattatgaagaattagggaatcattacacttcaagggaaactaataaagctccaataatgggccctaaagaaatggagatctctgcaatgactgacaattccaaatattcttcctaaagaagttcagtaaactataagaatatatggataaaaaaatcaagtaaaatttggaagacaactcacaaagtgagctttacaacaaaatagaaacaattttaaaaaatagaaatcccagagatgaggaatgcaatgattgaactgaaaaattaaatagattcaacagaagatgtgattaagcagcagaaaaaaatcagtgagctggaaaacaaaatttacaattattcaatcaaaggagccaaaagacaaaagaatgaaaaaatgtaacgaaatcctacaggaattatgggacaccatgaagagaccaaacttacacaatagaagttgcagaaggtgaataaagagaacaaggtccatagagcatatttaaagaaataagggctaaaaaaaacttccatattctgtgaacagatgccaacatccaggtgtaggaagcacagaagtcttcactcaaatacaactgaaagaggtgttaatcaagacacataataatcaaactaccaaaaatcaaagacaaaaaattctggagcagcaacaaataagaaactcatcacatacaaagaagtgtcactatcagcagatttctcaggagaaacactgcaggccaggaaagagtgggatgacatattcaaagtgctgaagaaacacaagcttttaaccaaaaatactttaatcagaaaattggtcttttaggaatgaggaagaaatagaaactttcccagaaaaatgaaagcaaagggatgtcataaccattacgccagtcttgtaagagttgctaaaaggacttctttaagctgaaacaaaaagctacaaattaataatgatacatatgaaactacaaagctcagtggtataagtaaagcagagccatattcagaatactgaagtactgtaatgatcacaggtaattttatccctggtacaagaattaaaaggcaaaactattaaaactatagctgaaataaatcgtcaagggacacacattacaa

SEQ ID NO: 1843 - DNA, 1092 bp, Homo sapiens
  source 1..1092: mol_type = other DNA
aagacacaggcatgggcaaggacttcatgtctaaaacaccaaaagcaatggcaacaaaagccaaaattgacaaatgggatctaaataaactaaagagcttctgcacagcaaaagaaactaccatcagagtgaacaggcaacctgcagaatggaagaaaattttcgcaacctactcatctgacaaagggctaatatccagaatctacaatgaactcaaacaaatttacaagaaaaaaacaaacaatcccatcaaaaagtgggtgaaggacatgaacagacacttctcaaaagaagacatttatgcagccaaaaaacacatgaaaaaatgctcagcatcactggccatcagagaattgcaaatcaaaaccacaatgagataccatctcacaccagtcagaatggcaatcattaaaaagtcaggaaacaacaggtgctggagaggatgtggagaaataggaacacttttacactgttggtgggactgtaaactagttcaaccattgtggaagtcagtgtggcgattcctcagggatctagaactagaaataccatttgacccagccatcccattactgggtatatacccaaaggactataaattgtgctgctataaagacacatgcacacgtatgtttattgcggcattattcacaatagcaaagacttggaaccaacccaaatgtccaacaatgatagactggattaagaaaatgtggcacatatacaccatggaatactatgcagccataaaaaatgatgagttcatgtcttttgtaggaacatggatgaaatcggaaatcatcattctcagtaaactatcacaagaacaaaaaaccaaacaccgcatattctcactcataggtgggaattgaacaatgagaacacatggacacaggaaggggaacatcacactctggggactgttgtggggtggggggaggagggagggatagcattgggagatatacctaacgctagatgatgagttagtgggtgcagcacaccagcatggcacatgtatacatatgtaactaacctgcacattgtacgcatgtaccctaaaacttaaagtataataataattttaaaaaa

SEQ ID NO: 1844 - DNA, 935 bp, Homo sapiens
  source 1..935: mol_type = other DNA
ctatttacaatgacaaccaaaaaccaaaatactaatttacgagtctaagaagatatttatagcatctgtttgctgacaactacaaaacaagaagaccaaaatggggagacatgctgtgtacataggctgcaaagctcacactgttaagaggtcaatggtctccaagtctacatgttcactgcatgcagtaaacccctggagaatattttgtagataacaagctgattttaaaatttatatggaaaggtaaaataactagaatagtcaaaacaattttcaaaaagaagaaagaggttatagcagtcacacaacctgatctcaaaatttactatcaagtactgtactgaagacagtgtgagactggcaaacagagatacacaaacacgcgacaggacagagtccagaagaagactcacaacatgctcaactgatttttgacaaaggaacaaaagcagttcaatggatattcatcagtcttttcaacaaacagaacaattggaaatccatacgccaaagaacgaactgcagacaaaatggatcacagacctacatgtaaaatgtgaaacgatgaagaaaatataggagaaaaatctttgtgagcttaggtttggcagacttcttagatatgctaccaaaagcactactgataaaggacaaatcctaagttggactttatctcaattaaacatttttgctctgtacaagacacttaagaacaaaaaaaaagacaagctacagactgagagaaaatatttgcaaatcatgtatctcgcaaaaaatctgtacccagatatgtaaagaagtctcaaaactcaaaactcaaaaaaaaaaaaaaaaaaaaaaaaaagcccaattgaaaaacaggcaaacaattggaacagacaattcaccaatgaagatatacaaacgacaaaaagcgcagggaaaaaatgctt

SEQ ID NO: 1845 - DNA, 298 bp, Homo sapiens
  source 1..298: mol_type = other DNA
ggccggtcgcggtggctcacgtctgtaatcccagcactttgggaggctgaggtgggcggatcacctgaggtcgggaatttgagaccagcctggccaatatggtggaaccctgtctctactaaaaatacaaaaaattagctgggcgtggtggctcgcttgtaatcccagctactcgggaggctgaggcaggagaatccttgaacccgggaggcacaggttacagtgagccgagatcacaccactgcactccagcctggacaacagagcgagactgtctccaaaaaaaaaaaaaaagaaa

SEQ ID NO: 1846 - DNA, 286 bp, Homo sapiens
  source 1..286: mol_type = other DNA
gccaggcacggtggctcacacctgtaatcccagcactttgggaggccgaggcgggtggatcacttgagatcaggagttcaagatcagtctggacaacatggcaaaaccctgtctctacaaaaaattagctgggtgtggtggcacgcacctgtaatcccagctgctctggaggctgaggcatgcgacgcttgaacccaggaggcggaggttgcagtgatccaagatcgcaccactgcactccagcctggaagaccaaacgagactctgtatcaaaaaataataataa

SEQ ID NO: 1847 - DNA, 157 bp, Homo sapiens
  source 1..157: mol_type = other DNA
gccagacggcagggcctgcgccccgcccgctcggactcaccatgggacgctgagcaagtcagttaaccagcccgagcttcattttcctcatctttaaaatggaaaaataacacttgttaccaacacctcaaaaatgtggggaggacaagaaaacata

SEQ ID NO: 1848 - DNA, 240 bp, Homo sapiens
  source 1..240: mol_type = other DNA
gtacaggacttggtgatcaggatccaggcactcacttgtattctactgctcaataaacgtttattaaacttgatcctgctacttatcttgtggcctctctgagcctcttgttttcttatttggaaaatggagatgttaattatgtaagctctaacttacagttattatgaggataaataagagaaagatttaaactatgaagtcctttagaaataaggtagcattcaatgacatagtagt

SEQ ID NO: 1849 - DNA, 578 bp, Homo sapiens
  source 1..578: mol_type = other DNA
tgctaaggtctttgaactaaagaaaatgaaagggtgttagaatcagcctcagaaccacggactttcttaacttctcctgttttgcccccaagtgcaggatgaaactcttcctctctgaagttaccttatccgaagctcctccagaaagaatccagtggtctttggtcagctccctgagactttcttaaccagggaagattaaactcatggcagaaggtaagactgagggatgtcaccacacctaagcagactttgtcagaagctgttgtctattctttgtcataatccaaagagtttccaaagagaataattcacaaactatggtcaattctttgggcccattcaactctcctaaaaacaatttcctactcctcaaaattgcctacattcccccatctctctctctcctgtgaagaagggtatatagattctgaacctcgctgggttactgggtagtcactctctcgtcattcccccatgaatacaataaacttgcctttttctccagtgaatctaccgtcggttaatttcagcaaactcaaaccttaaagggaaagggaaattcccctttgccccta

SEQ ID NO: 1850 - DNA, 1223 bp, Homo sapiens
  source 1..1223: mol_type = other DNA
atgccgagtcgaagctggactgtactgctgccatctcggctcactgcaacctccctgcctgattctcctgcctcagcctgccgagtgcctgcgattgcaggcgcgcgccgccacgcctgactggttttcgtatttttttggtggagacggggtttcgccgtgttggccgggctggtctccagctcctaaccacgagtgatccgccagcctcggcctcccgaggtgccgggattgcagacggagtctcgttcactcagtgctcaatgttgttgcccaggctggagtgcagtggcgtgatctcggctcgctacaacctccacctcccagcagcctgccttggcctcccaaagtgccgagattgcagcctctgcccggccgccaccccgtctgggaagtgaggagcgtctctgcctggctgcccatcgtctgggatgtgaggagcccctctgcctggctgcccagtttggaaagtgaggagcgtctctgccccccgccatcccgtctaggaaatgaggagcgtctctgcccggccgcccatcgtctgagatgtgggaagcgcctctgccccgccgccccgtctgggatgtgaggagcgcctctgcccggccgcgaccccgtctaggaggtgaggagcgtctctgcccggccacccctactgggaagtgaggagcccctctgcccggccaccacccggtctgggaggtgtacccaacagctcattgagaatgggccatgatgacaatggcggttttgtggaatagaaaagggggaaaggtggggaaaagattgagaaatcggatggttgccgtgtctgtgtagaaagaagtagacatgggagacttttcattttgttctgtactaagaaaaattcttctgccttgggatcctgttgatctgtgaccttacccccaaccctgtgctctctgaaacatgtgctgtgtccactcagggttaaatggattaagggcggtgcaagatgtgctttgttaaacagatgcttgaaggcagcatgctcgttaagagtcaacaccactccctaatctcaagtacccagggacacaaacactgcggaaggccgcagggtcctctgcctaggaaaaccagagacctttgttcacatgtttatctgctgaccttccctccactattgtcctatgaccctgccaaatccccctctctgggaaacacccaagaatgatcaataaatacttaaaaaaaaaaaa

SEQ ID NO: 1851 - DNA, 308 bp, Homo sapiens
  source 1..308: mol_type = other DNA
ggctgggtgcggtggctcatgcctgtaatcccagcactttgggaggtcaaggcgggcggatcatgaggtcaggagttcgagaccagcctggccaacatggtgaaaccctgtctctactaaaaataccacaaattagctgggcgtagtggcgggcgcctgtaatcctagctactcgggaggctgatgcaggagaatcgcttgaacccgggaggcagaggtttcagtgagctgaggtcgcaccactgcactccagcctgggtgacagagcgagactctgtctcaaaaaaaaaaaacaaaaaacacagaaa

SEQ ID NO: 1852 - DNA, 118 bp, Homo sapiens
  source 1..118: mol_type = other DNA
ggctaggcacagtggctcacacctgtaatccgagcactttgggaagccgaggtaggagggtaactgtagcccaggagttcaagactagactgggcaacatagtgagaccccatctcta

SEQ ID NO: 1853 - DNA, 154 bp, Homo sapiens
  source 1..154: mol_type = other DNA
aacaagcacagggtgtcggcagacctgggctctagccttacaagctctgccagaacttgaatcacacagagctgtatcaccatggtccagccatgtcctgccttggcctgtttcctcctctgtcaatgagggctttgaataagacctcctaggt

SEQ ID NO: 1854 - DNA, 300 bp, Homo sapiens
  source 1..300: mol_type = other DNA
gctgggccacggtggctttcgcctgtaatcctagcactttgggaggccaaggcaggcagactgcctgagctcaggagttcgagactagcctgagcaacacggtgaaaccctgtctctactaaaatacaaaaaagtagccaggtgtggcggcatgcacctgtagtcccagctactcgagaggctgaggcaggagaattgcttgaacccgggaggcggaggttgcagtgagtggagatcgcgccactgcactctagcctgggtgacagagcgagactccttctccaaaaaaaaagaaaagaa

SEQ ID NO: 1855 - DNA, 65 bp, Homo sapiens
  source 1..65: mol_type = other DNA
tctagattgtggatcttcagataaattctgccattttcatttcattccctgaaagtcagggttgg

SEQ ID NO: 1856 - DNA, 294 bp, Homo sapiens
  source 1..294: mol_type = other DNA
ggccaggtgtggtggctcacgcctgtaatcccagaactttgggaggctgaggcggatggatcacctgaggtcaggagttagagaccaacctgaccaacatggagaaaccccgtttctactaaaaatgcaaaattagccgggcatggtggcaggcgcctgtaatcccaaatactcgggaggctgaggcaggagaatcacttaaacccgggaggcagaggttgcagtgagccaagatcgcgccattgcactccagcctgggcaagaagagcaaaactccatctcaaaaaaaaaaaa

SEQ ID NO: 1857 - DNA, 191 bp, Homo sapiens
  source 1..191: mol_type = other DNA
gaggaaaaaaaccatggcttccaaagcaggaatatcacagtcctaaccttcgttctgccatttaccagcttgggcaagtcctttcattttcaggtcttcagtttcctcatttgcaagtcttggacccagtgatttccaaaggcccttccagttccatttgtcagacatctcattgagcatattctgtgatt

SEQ ID NO: 1858 - DNA, 65 bp, Homo sapiens
  source 1..65: mol_type = other DNA
tctagattgtggatcttcagataaattctgccattttcatttcacttcctgaaagtcagggtcgg

SEQ ID NO: 1859 - DNA, 606 bp, Homo sapiens
  source 1..606: mol_type = other DNA
tgttccttttaaaataactcagttttttatttctttgctgccacctgaaatagtttaccgtttcgctgagtaaaagccaacatgtcaaaaatggccttagttaacttataagaaaaggcctttgccacataatctctttatttcctgccactggcctcctcactcatgttggcccaaccacattgacatttgttgccccttgcagacatcaggcataccctcacctcagtatttttctcttgcttttctctgcatgaaattctcttaccatagagatctgcttggctaacatcttcatcgctttctagtctattcaaaattcaccttctccataaggcttacctgacctccttatatggcaacctggcctcccccttccccccctgtactcctgattccctttatcgtgctgttttttaagcttttttccattgcctcatgaatactgtatacttggcttattatcatgtgtattgtgtattgtgtttcttactctctgagtaaagtaaattgcatgaggatagggtttttttctgttttattctctgatgtatgtgaagcactagcctggagcataataggtcctcagtaaatatttgttgaatg

SEQ ID NO: 1860 - DNA, 373 bp, Homo sapiens
  source 1..373: mol_type = other DNA
gctatggttaaaatgtttttgtccattccaaaattcatgtgttggaaacttaatcctcaatgcaacagttttgggaggtggggccttttgggaggtgtttaattcatgaggacttgattaataacactacaaaatgagctttcaggagttgagttttctctcttctcctcttctgccatgtaggaacacagcattcatccccattttgtacttctgtcttctgcgatttcaagacacagcaagaaagccctcatcagatgccagtgccttgatcttggacttcccagccttcagagctgtgagaaaaaatgttctgttctttataaattaccatcacaggtattctgttacagcagcacaaaatggaccaaaa

SEQ ID NO: 1861 - DNA, 832 bp, Homo sapiens
  source 1..832: mol_type = other DNA
acccccacaatgtttcttgcttcttattctctcccggctaatgaccttacttcctttcctacttcactgagaagattgaagcaatcaaaagtaacttccacaaactcataccaacacatacttaatgaagcagcatttgtacccacatagtctgccttctcatcaattactataggtaaattttccctgctcttgtctaaaaccattcatttcagttgtccattaaacttcattcttcctttactcaagaacattcctgcagcaattctaccttctctctcctttttctgtcaagtttttgctctctacagaatcattcccatcagtgtgcaactgttttttctctcatcttagaaaaccaaacaaaactttcttaatgtcacttcccccaccagctaatgccctatttcttctactcctttgtagtaaaacttacaaagtattatctctactctctatttcccagtgtctgtattcccattcttaaatccacttcagtcaaatttttgcctccgccattccaccaaaactctttgccaaggacatcaatgatgagcactttgctaattccagtagtctgttcttagtctacatattactttatctaccaacagtatttgttaaaatttatcacttccacctccttggcatactttgtttacttggcttccaggatactacccacgtttgattttcctcctgcctggttccattttgcttcttctcagaatcctttgctagtttattctcttatttttatctacttaatggtgaagtgctccaggtctcaatacttgggaattcttctgagtcttctttctccattaccttg

SEQ ID NO: 1862 - DNA, 665 bp, Homo sapiens
  source 1..665: mol_type = other DNA
gtggtagggacaattctttgaaaacttccatgatctctacccactggtgttacaacctgtacaatcttctccccttgagtgtgagtgggacacatgacttacttctcactacaagaatatggcaaaagtgatgcaatgtcattagcatgattaaattatgttgtagggtagaggtggtgagaacgttactcctgtgatttggttcaatatataagactccatttttgctggcacacaatgtggagagattctcctactggccttgcaagaagcaaacagccaagttttgaaggtcctgtggagagggacgtgtggcaggcaactgtgggtggcctctagaatctgagagttgcctgtagccaatagccagttataagttgtggccctcagtcaaacaggttaaaaaaaaaaaaaaccctcacaaaaattgaatgctgccaacaacctggatgaacagggacgcatattagtcaaacctacaggtgagaatgcagcccagccaacactgattgcagccctgtgaggtcacaagcaaagggctcagcctgcctggcttaagtcatgcatgggctcttgacctacagaaattataagaaaataaatgtgtgttgcttaagccactaagtttgtggtaatttgttatacagcaatagaaaactaataca

SEQ ID NO: 1863 - DNA, 274 bp, Homo sapiens
  source 1..274: mol_type = other DNA
atccttttacctcgctaactcccatttatctttccaatctttggccagttatcagtttaccagagaagtgttacctggtttccacagtctagattatgtgttctttctgtgtacccactatgctatactgtcccataacagcaattattgcctgttcactagcctgtagagctcacaagaatgtgagctgtttacatattcatattcttatctttacactcacagcagcctagcacacatgtgcatatgtgtcaaatacttactaaatatttgt

SEQ ID NO: 1864 - DNA, 834 bp, Homo sapiens
  source 1..834: mol_type = other DNA
actacagccattttggaagacagtttaactgtttcttacaaaactaagcatacttttaacatacaatacagcaatcatgctccttggtatttacaaaaaattaattaaaaacatatgcctacacgaaaacttgcacacaaaagtttacagcagctttattaatgactgttcaaacatggaagcaaagatgccctacaatacaggtggatggataaaaaaacagtgatacatccatacaatggaatattatttcacgattaaaagacatgagctaacatgccataaaaagacaaagaggaaccttaaacgcatcttgttaaatgaaaaaaaaaaaaaggtcaatctaaaaaggctgcctactgtatgattccaattaaatgatgatctggaaaaggcaaaactatagagacagtaaatgtcagtggttaccaagggtgcctcggagggaaaaaaggggaaatggacaggtagaaaacagggaggttttctttttacaaatcttatatatatatatatgaaaacatataaaaatgtacaacgtaatgaatgaatcccaagatacattatagacttcagttaataagaatatctccattttggctcatcaattgtaccaactgtaccacactaattgtccaaacttggaagtaaagatgtccttcaacacaggtggatggctaaacaaagtagttaataataagttgttaatagtaagaaaaactgtgttaggagcagagggagttggggcaaaaagaaatacatggcaacactttggactttctgctcaattttttctgtaaacttaaaactgctctaaaaaacagtccattaatt

SEQ ID NO: 1865 - DNA, 303 bp, Homo sapiens
  source 1..303: mol_type = other DNA
ggctgggcaccatggctcatgcctgcaatcccagcatttgggaggccgaggcaggcagatcacgaggtcaacagattgggaccatcctggccaacacggtgaaaccccgtctctacttaaaatacaaaaattggctgggcttgatggcgcgcgcctgtagtcccacctactcgggaggctgaggcgggagagtcacttgaacctgggaggcggaggttccagtgagccaagatcactccactgcactccagcctggcaacagagtgagactctgtctcaaaaaaaaaaaaaaaaaaaaaaaga

SEQ ID NO: 1866 - DNA, 6659 bp, Homo sapiens
  source 1..6659: mol_type = other DNA
gggcaagatggctgactagatgcagccagatggaacacctagctgcatgttccatctaagatgactggcgtgctcctaacagatcttcagaaggaaggcactgagagtggatggaggaaagacacaagaagctgggctgaagggggaggacaatgggaaccctgcatgaggctactatgcattgggattcattcctggtccccagcaacttcaagggaatgagtgagttgaactagtaaggagcaagcccttcttggcacaggcccctggaactctggcaggaggagacccatcagccaccacagacacaagttggcagggagagctgcttatagaaataatagaggtagtaagccagctgagttggagccctatagttggagcacagccagggacagccatccccctaggctttacttgaccccataggacattttagccctaggggaatttttggaccagaattctgcagggtgatcttgcccatagatggggctgatttgacctgagcaccacttggtctgctcgcttctcttgggggcccaccctgacagcccctgcttgcagggaagccttgggtgccttgggggcccgtatcataactcctgagctggcagactatgcctgacgggtataaagcaccagtgatggagcctccaaccgcgcatcaacctgcccactccatcaccacactgcagcttcccctaggtccacagcaacctcccaaatcactttgccagtgcatgtgtgcccaagtaagttttgccttccttgcccctccagcacacatatattcatgcaccctgccctgccactgctgtggtagaaatgcagtctgccccctgccaccaccaatcaccattgaagtcagagccttgaggggcacagaagcagccagccctacccttgccagcaccttgcccatgtgccaacgctgcctcaggagtgaaactaggcacagagaacagtgaaccctcccctcccctgagagaccacccccacctgcagcacacaaagaatgcacacacacttgcactcatgaacatccctcccatgccaacagcaccaccaactggaccatatgcatagtagccagcaggggtctcctgccccactggaccatgttgcctctaccactgtagtgaatgcctgcaccctgctgcagcaaatgagtctgcacccaaccacacttcccctgccactgctgctggcatgtgtgaatgagcatggatgctgctttggtgctgacaccacccattgaagtgtagtgaccagtggtatgggagtactttagttgccccagtggggtggattcctaatgtcaaggagccagagaacaaagtcatggcctgatacaagtaccacagaattagagcatgcattccaagagttgggaactaagtgttgccccactaaaatctttcataaatgaaaccaggcagttgaattcaccttataccacaatcaaatcctcaaagtcataaaataggataaaagaaaaaaaactccccaaaggtcagcaacttcatggattcaaggaataccagcccacaaagatgagaaagaaccagtgcaagagccctgacaactcaaaaagtcagaatgccttctttcctccaaatgaccacattacctctccagcaagcattctgaatgggctgatatggctgaaatgacagaaatataattcaaaatatggatagaaatgaagatcattgagatgcaagaatacattgaaacctaattcaaggaagctaagaatgacaataaaattattcagaagctgacagacacaatagccggtatagaaaaggatttagccgatatgatagatctgaaaaacccagtacaagagtttcataatgtaatcataagtatcaatagcagaatagaccaagcagaagaaagaatctcagagcctgaagactggctttctaaaataaaacagtcagacaagaatagagaaaaaagagttaaaaggaatgaacaaaatctcttagaaatatggaattatgtaaggagaccaaacctatgaatcattggtgtctctgaaatagataagaagaatgtgagcaacttgacaatcatatttcaggatatcatccatgagaacctccccaacctagacaggccaatattcaaattcagaaaacagagataaattttgcaagatactacacaggaagacacatgaaaataagattctcaaaggtagaaatggatgaaaaaaaatgttaaagacagccagagagaaagcacagttcacctacaaagggagccccatcaggctaacagtagatgtctcagcagaagccctataaaccagaaaatattaggagtcaatattcaacattattaaagaaaagaagttctaaccataatttaatatttggccaaactaaacttcataagcaaaggagaaataaaatccttttcagacaaacaaatactgagggaattttttattaccagaccttattttcaagagttgccaaaggaagcactaaatatgggaaggaaagaccatcaggagccactacaaaaacacacttaagtacacaggccagtgacactaaaaagcaaccacataaagaagtcggcataataatcaggtaacagcatgataataggatcaaaaccacacatattaatactaatcttgtatgtaaatgggctaaataccctcaattaaaaggcacagggtggcaagctagataaagaaccaagacccattgttatgctgtcttcaagagacccacctcacatgcaattacacccataggctcaaaataaagggatgaagaaaaatctaccaagcaaatggaaaacagcaaaaggaggctttgtaatcctaatttcagatgaaacagactttaacaaagatcaaagaagacaaagaagggcattacataatggtaaaggattcaattcaacaagaagacctaactatcctaaatatatattcacccaagacaggaatacccacattcataaggcaagttcttacagaccttcaaagaaacttagactcccacacaacaatagtgggagacttcagcaccccactgacaatattggacaaatcatcaaggcaaaaaagttgacaaagatattcaggacctgaacccagcattgggtcagtggatctgatagacatatatggaattctgcatgcccatataacagaatatacattattctcatcatcacatgacacatactctaaaacagatcacataatccagcataaaacactcctcagtaaatgcaaaagaactgaaatcataacaaccagtctcttggacaatagcataatcaaattagaaatcaagactaagaaatttgcttaaaaccaggcgactactagaaattgaataacctatccccaaatgatttttgggtaaataatgaaattaaggcagaaatcgagaagttctttgaaactaatgagaacaaatatgcaatgtaccagaatctgtgagacacagctaaggcattgttaagtgggaaatttatagcactaaatgcccacatccaaaggtcagaaagatctcaatttaataacctaacatcacaaataaaagaactagggaacgaagagaaaaccaaccccaaatctagcataagacatgaaatattcaaaatcagggctgaagtgaaggagattgagacacaaaaagccattcaaaagatcaacaaatccaagagttgtttttgtgaaaaaagtaatcaagtagaccactaactagacttataaaaaaggaacgagagaaggtacaaataaacccaagtagaaatgacaaaggggaaaggagatgtaacaactgaccccacagaaatgaaaataacaagaagagaatagtatgaacatatctatgcacataaactagaaaatctagaagaaatggataaattccttgacacatatagcttcatgagactgagcagggaataaattgaatctctgaacagaccaataataaactctaaaattgaataagtaataaatagcctaccaactaaaaaaagcccaggaccagagagattcacagccaaattctaccagatgtgcaaagaagaagtactatcgttcctacagaaactattccaaaacttgaggagaaagaactcctttctaactcctcatatacactgcttattctctgaggccagtatcatcgtaatataaaagccttacagagacacaacagaaacaagaaaacttcagtccattatccttgatgaacatccatgcaaaaatcttcaaaagatcactggcaaactgaatccagcagcacatcaaaaagtgaatccaccacgatcaagtaggctttatccctgggatgcaaggttggttcaacatatgcaaatcagtaaatgtgattcatcacataaatggaactaaagacgaaaaccccatgattatctcaatagatacagaaaaggctttccgtaagattcaatgctccttcatataaaaaaccctcaatacactaagtattgagggaacatacctcaaaataataatagccatctgtaacaaacctgtagccaacatcataccaaacaggcaaaagctgaaagcattcttcttgaaaactggcacaagacaaagaatgccctctctcactactcctattcaacatagtattagaagaccgggctagaggaatcagacaagagaaagaaggaacaggcatgcaaataggaagacaggaagtcaaaccaaccctgtttgcagacaacattatcctatatctggaaaaccccacagtcttggcccaaagcttcttaagctgatacacaactttagcaaagtctcaggatacaaaattaatatataaaaatcactagtgtcctgtacaccaacaacaccaagcttagagccaaaccaggaacacaacccattcacaattgccacaaaaagaataaaacacctaggaatacagctaatgagggaggtgaaaaatctctacaaggagaactgaaaaacgctgcttaaagaaatcagagatgacacaaatagaaaaacagtctgtgcttatggataggaagaatcaatatcattaaagtggccatactgctcaaaacaattcataaattaaatgctattcctattatagtgtcattgacattcttcacagaactaggaaaaactattttaaaattcatatggaaccaaaaaaagagccccagtagacaaggcaatcctaagcaaaaagaacaaagttataagcatcatgctacccaacttcatgctatactacagttctacaacaatcaaaacagcatacatactactgatacaaaaacagacacatagaccaatggaacagaacatagaccccagaaataaggctgcaacgcttacaactatctgatctctgctaaagctgacataaacaagcaatgggaaaggactccctatttaataaatactgctgggttaactggctagccacatgcagaagaatgaaactgaacctccttcttatatcatatacaaaaaaaagctaaagatgagttaaggacttaaatgtaaaacccaaactataaaaaccgtggaagataacctaggcaataccattcaggacataggaatggacaaatatttcatgacaaagatgccaaaagcaattgcaacaaaaacaaaaatcgacaaatgggatctaattaaagaacttttgcacagcaaaataaactgtcaagaaagtaaacagagaacctacagaatgggagaaaatcttttcaaacaactatgcatctaacagaagtctaatatccagcatcataaggaatttaaacagttttgcaggaaaaacaaataaaaccccattaaaagtgagcaaaacagacacttttcaaaataagacatacatagagccaaaaagcatatgaagcaaagctcatcatcactgatcattcaaattaaaaccactatgaaatatgatctcataccagtcaaaatggctatttttaaaaagataaaagcagatgttggtgagattgcagagaaaagggaatgcttgtacactgttgaggggaatataaattagtttattcactgtggaaaacagtttggagatttctcaaagaaattaaaacaaaaatatgattcgatccagcaatctcattactgagtatatatgcaaaagaaaacaaattgttctaccaaaatgacacatgcttgtgtatgttcattgcagcactattcacaatagaaaagacatggaatcaacctaaatgaccatcagtggtagagtggataaagaaaatatggcacatacacaatggaatactatgtagctgtaaaaaataatgaaatcatgtccgttgcaggaacatggatggagctggaggccattatccttagcaaactaatgcgagaacagaaaacaaaatatcacaagttctcaattataactgggagctaaattatgagaacacatggacatatagaggggaacaacaaacactggagcctatcagagggtggagggttggataagggagaggatcaggaaaaataactaatgggtacaaggctaaatacctatatgacaaaataatctgtacaacaaactcccgtaacatgagtttacctatataataaatctgcatatgtacccctgaacttaaaataaaagttaaaaaataaa

SEQ ID NO: 1867 - DNA, 308 bp, Homo sapiens
  source 1..308: mol_type = other DNA
ggccaggctcagtggctcacacgtgtaatcccagcactttgggaagctgatgcgcgctgatcacgaggtcaggagatccagaccttcctggctaacacagtgaaaccccgtctgtactaaaaatacaaaaaaaaaattagccgggcctggtatggggcgcctgtagtcccagctactcgggaggctgaggcaagagaatgatgtgaatgaggcggagcttgcagtgagtcgagatcgcgccactgcactccagcctgggtgacagcgtgagactccatctaaaaaaaaaaaaaaaaaagaaaaaagaa

SEQ ID NO: 1868 - DNA, 1558 bp, Homo sapiens
  source 1..1558: mol_type = other DNA
aaatttgtactgggagtggggtgttgctgaaaagatacccaaatatgtggatgcaactttggaactgggtaagagacataggttggaacagtttggagggctcagaagaagacaggaaaatgtgggcaagtttggaacctcctagagactttgacaaaaacactgatagtgataggaacaataaggtccaggctgaggtggtctcagatggagatgaggaacttgttgggaactggagcaaaggtgactcttgttatgtttcagcaaagacactggcagcatttcgcccctgccctagagatctgtggaactttgaacttgagagagatgatttagggtatctagtggaagaagtttctaaacagcaaagcattcaaaatgtgacttaaacgtgctgttaaacacattccattttaaaagggaagcagagcataaaggttcacaaaattttcagcctgatgatgcagtagaaaagaaaaacccattttctgagaagaaattcaaaatggctgcagaaatttgcataagtagcaaggagcctaatgttaatccccaagaccatggggaaaatgtctccaggccatgtcagagaccttcatggcagcccctcccatcactggcccaggggcccaggaggaaacagtagtttcgagggccaggcccagggtccccttgctgagtgcagcctgggaacttggtgccttgtgtcccagccactccagtggctgacagtggccaatataaagctcaggctgtggcttcagagggtggaaacctcaagccttggcagcttctacatggtgttgagcctgctggtacacagaagtcaagaactgagctttgggaacctccgcctagatttcagaagatgtatagaaatgcctggattcccaggcaaaagtttgctgcatgagcaaacttggagggccctcatggagaacctctgctagggcagtgcagaaaggaaatgtggggttgaagcccccacacagagtccctactgggggaccaccgagtagagctgtgagaagacagccacagtcttccagaccccagaatggtagatccaccaacagcttgcaccatgcaccaagaaaagcctctgacactcaatgctagcccatgaaagcaaccaggagagaggctgtaccctgcaaagccacaggggcggagctacacaagaccatgggaacccacctcttccatcagtgtgacctggatgtgagacctggagtcaaaggagatcattttggagctttaaaatttgactgccctgctggatttcggacttgcatgggcccttgcatggccaatttctccatttggaatggctgtatttacccaatacctgtactcccattatatctaggaagtaactagattgcttttgattttacaggctcataggtgaaaggaacttgccttgtctcacatgagactctggactgtaggcttttgggttaacactggaatgagttaagactttaggagactgttgtgaaggcatgattggttttgaaatgtgaggacatgagatttggaggggccaggggtggaa

SEQ ID NO: 1869 - DNA, 348 bp, Homo sapiens
  source 1..348: mol_type = other DNA
tgaaattatctgtagctattaatgtcaggtttttgaaatttactgacctggaagaatactcataatgcaatgtcaagtgagaagcaggacaaagaacatttgcaatacagttgtatttataaaattttgtttacacacacaaaaaatgtattttgcttagaaatataatttacatatatatacaaccacacaagggaaataacaaaatgttaatactagctaatttctatagagttggcattttaagtcagaggggtattgatgaatagatgtagtttattaaatttttttctctatttcctaaactttctataaagaacttgtagtatctttataataggaaaaaaa

SEQ ID NO: 1870 - DNA, 278 bp, Homo sapiens
  source 1..278: mol_type = other DNA
tggctcatgcttgtaatcccagcactgtaatcacagcctaggcaggagaatgacttgagcccaggattttgagaccagcctgggcaacatggtgagaccatgtttctacaaaaaaataacattagccaggcttaatggtgcacacctgtaatcccagctacttgggaggctgagggaggaggattgcttgagcccaggagtttgaggctgaagtgagttatgttcataccattgcactccagcctgggcaacagagtgagaccctgtctcaaaacaaa

SEQ ID NO: 1871 - DNA, 428 bp, Homo sapiens
  source 1..428: mol_type = other DNA
tgttgagagacaagtctctatgtctctcacatttctgcacatcttgcagacaaagtactattaactgtcctttgttaaggcctaattaaggctgtacagagaacagtcttggaagacacagtgtcttcctccagagtaaaaggaagacatgtttactgcctgttttaaaagattcaagttccctaaactcaagggtcctcttgtaacacaacctactgcactactgtgtgtgcaggtatcatttgaccctctttttatcaccctgtgggaactggggctcagataattaccttacacactaatattctgactactgttaatgctgtgagtaataaactgtccttcatctccgacccggcattcattaaagtgtggcaggccatggcttgcaagcagagtaaaatctaagatccttcacaattcttgac

SEQ ID NO: 1872 - DNA, 304 bp, Homo sapiens
  source 1..304: mol_type = other DNA
ggccgggtgcggtggctcaagcctgtaatcccagcactttgggaggccgaggcaggcggatcaccaggtcaggagatcaagaccatcctggctaacacagtgaaaccccgtctatactaaaaatacaaaaaaattagccgggcgtggtggtgggcacctgtagacccagctactcgggaggctgaggcaggagaatggcgtgaacccaggaggcggagcttgcagtgagccgagatcgcaccactgcactccagcctgcgccacagagcgagactccatttccaaaaaaaaaaaaaaaatgaaa

SEQ ID NO: 1873 - DNA, 102 bp, Homo sapiens
  source 1..102: mol_type = other DNA
ggcagctgaggcaaaaggatcacttgaacccaggagaccaaggccagcatgggcaatatagtgagaccccacctctttaaaaaaaaaaaaaaagaaagaaaa

SEQ ID NO: 1874 - DNA, 66 bp, Homo sapiens
  source 1..66: mol_type = other DNA
atgattcaattaggtaatgcattggaaaatgctttatagattctaaagttctctgtaagtagcaag

SEQ ID NO: 1875 - DNA, 297 bp, Homo sapiens
  source 1..297: mol_type = other DNA
gccgggtgcagtgtggctcacgcctgtaatcctagcactttgggaggccaaggcaggaggattgcctgaagctgggttcaagaccagcttgggcaacatagcaagacccctgtctctacaaaaaaaaaaaagaagaagattagctcggtgtggtggtgctaagcaactagggaggctgaggtgggaggatctcttgagcccaggagttggaggctgcagtgagctatgatcacaccactgcactctggcctgggtgacagagcaagaccctgtctctgaaacacaaaaagaaagaaa

SEQ ID NO: 1876 - DNA, 1580 bp, Homo sapiens
  source 1..1580: mol_type = other DNA
ttgaactatgaaaaatagaaaacctgagcagaccaataacaagtaacaagattgaatcagtactaaaagtctcccagcaaagaaaagctcaggacttgatggattcactgctgaattctaccaaacatttaaagaaaaactaataccaattcttatcaaactattcaaaaaaattgaagtagagggagttgatccaaattcattctaaaaggctaacattaccctgataccaaaaccaaagacacaacaaaaagcaaaaaggccagtgtcacaaattaacatacatgcaaaaatcttttaacaaaatactagcaaactaaattcaacagcacatctaaaagttcattcgtagtgatcaagtgggattcatccttgagatgcaagaatggttccacatatacaattcaataaatttgacacataacattaacagaatgaaggccaaaaaccatctgatcatctcaatagatgaagaaaaatcatttgacaaaattcaatgtttctttattataaaaaccctaaacaaatcaggtataaaaagaatgtatctcaacacaataaggaccagaaatgacatacccacagctaacatcgtactgaatggggaaaaattgaaacctttctctctaaaaatctggaacaaggcaaggatgcccactttcaccacttctatttgacatggtactgaaatcctagccagagcaattagagaagagaaagaaatacagggcatccaaattggaaagaatgaagtcagattgttcttgtttgcagatgacatgatcttgtatatagaaaactctacagacgccatttaaaaatagctgttgggactaaaaaacaaatttagtaaaattgcaggatataaaatcaatatacaaaaaattagtggtggttctatagaccaagtgcaaactatctgaaaaagaaagaaatcaatcacgtttacaatagataaaaaaaatctaggaataaatataactaaggaagtgaaagacttctaccatgaaaactataaaacattgatgaaataaattgaagaggacactaacaaatggaaagatatctcatgttaatggattggaagaattaatattattaaaatggccatactactcaaagcaatctacagaatcagtgcaatacctatagaaataccaatgagattctttatagaaatagaaaaagcaatcctaaaatttgcaaggaaccacataaagtccctgaatagctaaagaatcttgagaaaaaagaacaaagctgcaggcattatactacctaactttaaaatatactacaaaagagtagtaaccaaacactgtggtaactgcatgaaaacagacacatagaccaatgaaagagaatagagaagctagaaatgaatccatgcttttataaccaactgatttttgacaaagatgtcaagaatacacattaggaaaaggacaatctcttcaggaaatggtactaggaaaactggatatctacatgtggaagaataaaactagacggttctctctcaccacttacaaaaattaactcaaaatggattaaagacttacacgtaagaacccaaatta

SEQ ID NO: 1877 - DNA, 1195 bp, Homo sapiens
  source 1..1195: mol_type = other DNA
agtcatgtgccactgacattttcagtcaaaggcagaacacatatatgtaagtggtaccctaagattataatagagctgaaaaaaattcctatcacctactgacattgtagctatcatcgcaacatgttactcacatgtttgtggtgatgatggtgtaaagcaagcttgtccaacccttggcccacacagtatttgatatatgcatagtacataatatttgagaatgataataaatgactaagttactggtttaggcatttcttatactatatttctcataattattttagagtgtactccgtctacttacaaaaaaaagttaactataaaacagcctcaggcagattcttcaggaggtatccaaaagaagacattgctatcataggagatgacggctccaagcatgttattacccctgaagaccttccagtgggacaagatgtgaaggtggaagacagtggtattagtgaccttgataccgtatagtcctacgttaatgtgaaggtttgtgtcttagtttttagtaaaagagttttaaaactaaaaaaaaaaaaaaaaaaaggaaaactttttacaatagaaaaaagcttatggaatacagataaagaaaaatgtatttttgtatacctgtacaatgtatttatgttttaagctgtgattacaaaagagtcaaaaagtttttaaaaatcaaaagtttataaagtaaaatagttatagtaagctaaggttattattgaagaaaaatatttttaaaataaatttagtgtagcctaagtgaacagtgtgtttataaagtctggagtaatgtacaataatgccctaggccttcacattcactcaccactcactcactgactcacctggggcaacttctagtcctgcaagctccattcacagtaagtgccctatacaggagtaccatttctcttcttttttctgtatttttactggaccttttctatgtttagatacacaaatacttatcattgtgttacaactgcctacaatattcagtacaataacatgctgtacagtgttgtaggctttgagaaataggctataccatatatcctagtgtgtagcaggctatatcatctaggtttgtgtaaatgtactctatgacgtttgcacaatgacaaaggagcctaatgatgtatttcttaaaatgtatccccgtgattaagcaacacacact

SEQ ID NO: 1878 - DNA, 227 bp, Homo sapiens
  source 1..227: mol_type = other DNA
tgtatgtagatcagaaatggctttatgaaagatagaccacattcttggagtgagaatatgagaattaatgactggtctgttaaatctctttgaagccagggggtgctaccagttctgctgatcaatgtatttaggagtgagatggttacaaaggcctgagaatgtatctctaaagttctggattctaacttacaaggtttgagacaaactgtcttcatctgtttttc

SEQ ID NO: 1879 - DNA, 82 bp, Homo sapiens
  source 1..82: mol_type = other DNA
atggcctgtggatatgggaggctctaataataaaattctgacaataactgatacccaaagaaaaagagagtggttgtctaag

SEQ ID NO: 1880 - DNA, 249 bp, Homo sapiens
  source 1..249: mol_type = other DNA
gtgtggtgggtaagtgtgcaggctatgatggagacggatgtattcaaaccctagttccattacttatttgctgggtgatcttgaacaagttacttaagctgcctgtttcccacctttctcatttgcgaaatgctgatgatagtatctcataggattttctcttaggattttccatagggattaaatgaactaatacatgtaaaatgcttagaaaaatgcttcccctggaagtgcatactaagtactcaa

SEQ ID NO: 1881 - DNA, 2196 bp, Homo sapiens
  source 1..2196: mol_type = other DNA
caggcatacttcgtcttactgcatttcgcttcactgtgcaccacatatactgtgctttttacaaatggaaggtttgtggcaaccttacatcgagtaagtctgtcggtgccatctttccaacagcgtgtgctcactcatgtctttgtgtcacattttggtaattcattccacctttcaaactttttcattattattatatctgttatgtggtgggtgatcagtgatctttgatgtcactgttacatttgtttgggggtacacaaatcatgcttatatacgatggcacacttaataattgtgtgtgttctgactgctccactgactggctcttctctctcatctctccctctcctcaggattccctattctatgagacataaaaatattaaaactaggccaattagtacccctgcaatggcttctaggcattcaagtgaaaggaagagtcacccatctctcactttaaatcaaaagctagaaacgatgaagcttagtgagaaaggcacgtcgaaaagcaagataggccaaaagctaggtcacttgcaccaagaagttagccacattgtgagtgcaaaggaaaagttcttttaagaaattaaaaccactactccagtcagtgaacacacaaataatacgaaagtgaaaagaggcttattgctgacagggagaaagttttagtgacagaagatgaaaccagccacaacattcccgtaagccaaaacctaatccagagcaaggccctaactctgttcagttctatgaaggctgacagaggtgaggaagctgcagaagaaaagttgcaagctagcagaggttggtttatgtggtttagggaaagatgccataacataaaagtgtagggtgaagcagcaagtgctgatggagaagctgtgggacaggctgatattcttattagaagctaaagcagctggtaactttaagtggaagccaactctcatttatcattctgaaaatcctagggccattaagaatagtggtagaactactcggcctgtgctcaaggaatggaacgacgaaggctggatgatggtacaatgtttacaccatggtttattgaatatgttaagctcacagtgaagatgtactactcagaaaaaaagattcctttcagaatattattgctcgttgacaatgcactcggtcacccaagagctctgatggagatgtacaaggagattaacactgtattcatgcctgctaacacagcatccattctgcaggtcaaggagtcattttgactttcaagtcttactacttaaaaaatgcatttcataagactgtcactgccgtaggtagtgattcctctaatggatctgggcaaagtcagttgaaaaccttctggaaaggattcaccattttggatgttgttaagaacatgtttgattcatgggagaaggtgaaaatatcaacattaacagaagatgggaagaagttgattccaaccctcatagatgactttgaaaggttcaaaactccagtgaaggtagtcattgcagatgtatggaaatgaactcaagttagaagtagagtctgaaaatgtgactgaactactgtaatctcacgatcacacttaaacagatgaggagtggcttcttatggatgagcaaagaaacttgtttcttgagatggaatttactcctggtgaagatgttgtgaacattgttgaagtgacaacaaataacaaacttaattaataaagcagcagcaggatttgagaggattgcctacaattttgatagaagttttactgtggataaaatgctatcacatggcatcacatgctagagaaatctttaatgaaaggtcaaatcaatcaatggggaacacttcatcattgtcttgttttaagaaattgccacagctaccccaaacttcagcaaccaccacatgatcagccagcagccaccaacatgaaggcaagaccctctaccagccaaaagattatggttccctgaaagttcagatgattgttcacatgtttttagaaataaagtatttttaattaagacatacgcttttttatagacataaggctattgcacccttagactacagcataatgttaatataacttttatatgcacttggaaaccaaaaatatgactcgcttcattgtgatattcgttttattgtagtagtctggaactgaacctgcattatctctaaggtatgcct

SEQ ID NO: 1882 - DNA, 281 bp, Homo sapiens
  source 1..281: mol_type = other DNA
catcacgcctgtgtctgcctagacagacccacatctcccaactgaaatgttgcatagtgtcctggtcattccctctcttccacttccctggtaaccttgtaattgtagtcttcatggaattcagagtgaccttctaaagtcatatctctccattgcttatgatcctttcaagacctgtcattgcctaaatatgaaggccaaatctgttggacgacttttaagggaatttcattgtctgatccttgctgaactctcatttgcttttctccactcctcctatc

SEQ ID NO: 1883 - DNA, 42 bp, Homo sapiens
  source 1..42: mol_type = other DNA
gcctggcacatattaaatcctcagtaattatctgttggatga

SEQ ID NO: 1884 - DNA, 209 bp, Homo sapiens
  source 1..209: mol_type = other DNA
cagtgaggacatggatatggaagtcacctgacttgaggtcagagcttggctttgccagtaaccagctgtgtaacctcgggtaagtttatgatatgcctcgagcctcaatttccgtctctgtgtcactgagactgttagcgcccacctcataaggtcatggtgcagacagcatgagataagctgagtgggagcagcagcccagtgcccag

SEQ ID NO: 1885 - DNA, 305 bp, Homo sapiens
  source 1..305: mol_type = other DNA
gccaggtgcggtggctcacgcctctaatcccagcactttgggaggccgaggcgggcggatcacgaggtcaggagatccagaccatcctggctaacacggtgaaaccccgtctctactaaaaatataaaaaattagccgggcatggtggcgggcacgtgtagtcccagctacttgggaggctgaggcaggagaatggcgtgaaccccgggggacggagcctgcagtgagccgagatcgcgccactgcactccagcctgggcaacagcgagacttcatctcaaaaaaaaaaaaaaaaaaaagaagaa

SEQ ID NO: 1886 - DNA, 347 bp, Homo sapiens
  source 1..347: mol_type = other DNA
gccgggcatggtggctcaggtctgtaatcccagcactctgggagcccaaggcgggtggatcacctgaggatcaggagttcgagaccaggctggccaacatggtgaaacctcatctctattaaaaatacaaaaaaaaaaaaaaaaaaaaaaaaaaaagctgggcatggtggtgggtgcctgtaatcccagctacttgggaggctgaggcaggagaattgcttgaacctgggaggcagatgttgcagtaagccaagaccatgttattgcgctcccacctgggtgacagagcaataccctgtttcaacaaacaaacaaacaaacaaaaaagagaaagaaagaaagaaaaa

SEQ ID NO: 1887 - DNA, 132 bp, Homo sapiens
  source 1..132: mol_type = other DNA
ctgcttcatacctttgcatgtatttctcttcctgcttagaataccatctttcctttcttttgtttatttcaatgctagcaattcttcaacaacccatgtcaaataccacctcttcagtgaacgttttgtctg

SEQ ID NO: 1888 - DNA, 1155 bp, Homo sapiens
  source 1..1155: mol_type = other DNA
tcgttcttgagatacttttttttttttacttggcttctaggactctgaaatcttcctattgtcctatcaagtcattggctggatcttcccaaagtcctcatcattttctgatctataaatattggcaggtctagagatcctttcccagaactcatccttctctacacatttatctctaggtgacatcacgtagccttctgactgtaaatgccagatacatactgataactctgaaatgtatacttccacagccccaacctccaatcttactatagattcacatcccattgtattgacatgacatctccttaaagttaacttgtgcagagttgaactccagattccctccattccaaactcgtgtgtttcctaaggacttcacaatagctcaggcaaaaagctttggaaacagccttgtctttcttgtctctcaaatccacatccaattaacagattatgctgagtttagccttcaaaatataacctgaatttcattccttctcgcccccttcaccataccttagtgtacgccacccttctctctcacccgaacctctgcaacccgaacctctgcaacggtcctctgaactagtctctctgcttccactttaacctttcctagtatactgtctacacaacaactagtgtaatctttttatcactcagatcaggtctatacccatcctgaaccctcccaacatcctcccttccctcttagaaaatccaaagcctctgtctggtcctggctactactccaaactcacccctttctcattctgctccagcaattccaacctccttgcctttcccagattccatcaagcctactcccatgagggctctgcatgttgccccctcagtggcctcttctcagggatctgtatcacttgctccatcacttcattgaggttcctgcttaaatgttgcctctcagagaagctaaacatttggcatcccatcaaaaatgtcatcccctattgtactctattccttttacctagccccttatatttttatagcactttccctaatatcacatatgtatttgttgactttcttctctggcagaaggtaagttccatgaaagcagagttttgtttggttcatttgcctgttccaagtacccagcatacagcaggcactaaataagtactt

SEQ ID NO: 1889 - DNA, 178 bp, Homo sapiens
  source 1..178: mol_type = other DNA
tggttctccaaagcagtgtctttactggcagtttcagaatcacccaacacttgctcataggatgcattcttgggcctcaacctagacctactaaatcagagtttatagggtaaagtccaggaatttgtggtttttaacagtctcctgagataatttggatgttccatcaggtctgaga

SEQ ID NO: 1890 - DNA, 67 bp, Homo sapiens
  source 1..67: mol_type = other DNA
agcaactcccaaggtgtatttcaagaaacatcagttctatgagatattaacagatattaatggataa

SEQ ID NO: 1891 - DNA, 524 bp, Homo sapiens
  source 1..524: mol_type = other DNA
cagtaatttaaaactaacacaaacttaggagtttgaatcaaacataaattcagtataaatatataatgtaaaatggctctcccaaatgctaaatcaacattatacttcattgagagaacacaggatctagaatggggctgcaagctcgttcccattttggatgggtcacattcagacaccacactatggttgcatcagctgtcacaccgacctagacagctggatgccatttggagtagaataaccagactggtgagtaaactagaaatcatattacgtgaagagtggcaaaaggcctgagaaagtttagtttggaaaacatgacttaaaaggggcatcaatgccctctctatttatttgaaggcctcatttccaaaaaaaaaaaaaaaaaaaaaaaggattaaacatattctgtgtcgcttcagaatatgagaaaaaagataaatggatgaaaatttagaatgtttacattatgtccatacaagaaaactcctaaatagggctggtcacacttggaataagtt

SEQ ID NO: 1892 - DNA, 926 bp, Homo sapiens
  source 1..926: mol_type = other DNA
tggcttgctttttctttctgtccattcctttctcatgtttactggcctcttaaatgatgacataccccacagtgggctctccttaaccctctctttgctccacatcatttccatagggctgtaacccattcttaatttgaactatcattcatctatacaccagtgatcagtaattccagacctagcctgagaattgctctgcagaaacaggacttaggtttccaagtgcctacctcatatcaacttggctatttaatagaccatccctctcgacttctctcaggtagtagaatcagacagctagcagccaaactagaaaacttgtggtgatgattaaatcctgtcattctctagcctttcacctctaattatgggccacatgctaatgattctatctcaattccatagctgcctcttcattcacacacctctatcttgcaaaagatcttcattttcttgaactctggtaacaatttcctaaatggtctctttatatcagtatcttacaactcacagacttcctggacgttgtattttgatgataactccagaaataaaccaaactgttctcttgtcactgctgcataaaagccctctccatggactcttcatggagaatcaagtccacacctcctggtaatatggctcctataatctctcttccttcatctcttatatgtcccactgcatatgtgaagcagccatcatatcaaacatctaaacagtccccaagtaagatttaccactacttgtttacatgcttttgtgtctgatgtaccctttggttggaatattcttcccttttctttgcctaataaacttctattcatccatcaacaactttgaaaagtcttctttggtgctttatggcaaattcagagccttgttcttttgtggccccatagtacttgacctgtgtgatattt

SEQ ID NO: 1893 - DNA, 301 bp, Homo sapiens
  source 1..301: mol_type = other DNA
ctaggcatggtggatcacacctgtaatctcagaactttgggagacaggtgggaagattgcttcagcccagtagtttcaaatcagcctgggcaacctggcaatacctcatctctacaaaaataaaatgagccaggtatgatagtgtgtgcctgtagtactagctactttggaggctgaggcaggaaaattgctggagctgaggaggttgaggctgtagtgagccgtgtttgtgccactgtactccagcctgtgtgacagagcaaaagaccctgtcttaaaaaaaaaaaaaaaaaaaaaaaaa

SEQ ID NO: 1894 - DNA, 303 bp, Homo sapiens
  source 1..303: mol_type = other DNA
gctgggcgcagtggctcacgcctgtaatcccagcactttgggaggccaagactggcggatcacctgaggtagggagttcaagaccagcctaaccaacatagagaaaccccatctctactaaaaatacaaaattagctgggtgtggtggcgcatgcctgtaatcccagctatttgggaggctgaggcaggagaattgcttaaacctgcgaggcagaggttgtggtaagccgagatcgcgccattgcactccagcctgggcaacaagagtgaaactctttctcaaaaaaaaaaaaaaaaaaaaaa

SEQ ID NO: 1895 - DNA, 191 bp, Homo sapiens
  source 1..191: mol_type = other DNA
aaaagcatagtcactggcatccgacagacctaggtacagatcctatattcatcatttactagctaggtgaccttaagacttttttctattatctataaagtaggaatactaatagctatttcattgggaggttgtgaatgtaaagaaatcagttgtaaagcatgtgataaatgctcaataaatattaattc

SEQ ID NO: 1896 - DNA, 2985 bp, Homo sapiens
  source 1..2985: mol_type = other DNA
aaggagacagagacccaaaaatcccttcaaaaaaatcaatgaatccaggagctggttttttgaaaagattaacaaaatagatagactgctagccagactaataaagaagaaaagaaaggagaatcaaatagacacaataaaaaatgataacggggaatatcaccactaatcccacagaaatacaaactaccatcagaaaataaacacctctatgcaaataaactagaaaatctagaagaaatgtatagattcctggacacatacaccctcccaagactgaatcaggaagaaatcgaatccctgaatagaccgataacaagttttgaaattgaggcagtaattaatagcctaccaaccaaaaaaagtccaggaccggatggattcacagccaaattctaccagaggtacaaagaggagctggtaccattccttctgaaactattccaatcaatagaaaaagagggactccaccctaactcattttatgaggccagcatcagcctgataccaaagcctggcagagacacaacaaaaaaagaaaatttcaggccaaaaatatccctgatgaacatcaatgcaaaaatctcaataaaatactggcaaaccgaatacagcagcacatcaaaaagcttatccaccacaatcaagtcggcttcatccctgggatgcaaggctggttcaacatactcaaataaataaacgtaatccatcacataaacataaccagtgacaaaaaccacatgattatctcaatagatgcagaaaaggccttcgataaaattcaacacccttcatgctaaaaactctcaataaactaggttttgatggaatgtatctcaaaataataagagctattgatgacaaactgacagccagtatcatgctgaatgggcaaaagctggaagcattcccttagaaaattggcacaagacaaggatgccctctctcaccactcctattcaacatagtattggaagttctggccagggcagtcaggcaagagaaagaaagaaagtttattccaataggaagagaggaagtcaaattgtctgtttacagatgacatgattgtatagttagaaaaccccatcatctcagcccaaaatctccctaaactgataagcaacttcagcaaagtctcaggatacaaaatcaatgtgcaaaaatcacaagcattcctattcaccaataacagacaaacagagagccaaatcatgagtgaactcccattcacaattgctacaaagagaataaaatagctaggaatacaacttacaagggatgtgaaggacctcttcaaggagaactacaaaccaccgttcaacaaagtaagagaggaaacaaacaaatggaaaaacattccatgctcgtggataggaagaatcaatatcatgaaaatggccatactgcccaaagtaatttatagattcagtgctatccccatcaagctaccattttctttcctcacagaactagaaaaaactactttaaatttcatatggagccaaaaaagggcccatatagctaagacaatcctaagcaaaaagaacaaagctggaggcatcatgctacctgacttcaaactatactacaaggctacagtaaccaaaacggcatggtactggtaccaaaaaagatatatagaccaatggaacagaacagacgcctcagaaataataccacacatctacaaccatctgatctttgacaaaccagacaaaaacaagcatgaggaaaggattacctatataacaaatggtgttgagaaaactggctagccatatgcagaaaactgaaactggaccccttccttacactttatacaaaaattaactcaagatggtttaaagacttaaatgtaagacctaaaatcataaaaaccctagaagaaaacctaggcaataccattcaagacataggcatgggcagacttcatgactaaatcaccaaaagcaatggcaacaaaagccaaaattgacaaatgggatctaattaaactaaagagctctacacagcaaacaaaacgaccgtcagagtgaacaggcaacctacagaatgggagaaaatttttgcaatctatccatctgacaaagggctaatatccagattctataaggaatttaaacaaatttacaagaaaaaaacaaccccatcaaaaagtaggcaaaggatatgaacagacacttctcaaaacaagacttttatgtggccaacaaacatatgaaaaaaagctcatcatcactggtcattagagaaatgcaagtcaaaactgctatgagatgctatctcccaccatttagaatggtgatcattaaaaagtcagcagacaacagatgctggagaggatgtggagaaataggaatgcttttacactgttggtgggagtgtaaattagttccaccattgtggaagacagtgtggcgattcttcaaggacctagaaccagaaatacaatttgagccagcaatcccattactgggtatatacccaaaggcttataaatcattctgctataaagacacatgcacacatatgtttactgcagcactattcacaatagcaaagtcttggaaccaacccaaatgcccatcaatgatagactggataaagaaaatgtggcacatatacaccgtggagtactatgcagccataaaaaggatgagttcatgtcctttgcagggacatggatgaagctggaaaccatcactctcagcaaactaacacaggaacaaaaaaccaaacaccgcatgttctcactcgtaagtgggagttgaacaatgggaacacatggacacagaggggaacatcacatactgtggcctgttgggggatgggggggctagggaaggggttaggagaaatacctaatgtagatgatgggttgatgggtgcagcaaagcaccatggcatgtgtatacctatgtaacaaacttgcatgttccgcacacgtatcccagaacttaaagtataattttaaaaaaagaa

SEQ ID NO: 1897 - DNA, 1460 bp, Homo sapiens
  source 1..1460: mol_type = other DNA
tgatactggatgtaaatattcacaaaagaatgaagactgtcagaaacagcaacgggagtgaatatattgaaatttttcttactgcttaaatctctttaaaagataatagtctgaacaaaattaatgggaacacagtgtgggatttgcagcttatataaaagtaaaatgcatgatgaaactagcaccaagttcaggaggggaaaaaagaagtatgctcttgtagggctcttttatgagaaccggtatgctatcacttgaaggcagactgtgataagttaaagatttataatatgagccctaaaacaactaaaaaaaaaacaaagagttatagctaataaagcaacaagggagataaaatagtgacattgaggaatgctcagttaatctgaaagaaggcagaaaaagagaagtaaccaatagaaaacacatggcaagatgatagatttaaacctgatcgtataaataattatattaattgtaagtaacctaaattgaaactcaacttaaaaagcagagattgtcagattatataagcaagcaagacccaatatgtggcctacaagacatatttcaagtattaatatgaagacaaaataggtttaaagtaaatatatgaaaaaaactgtactgtgttagcactaatagaaagagtagctatgttaataggaaacaaagtagatttcagatcaaagaatataactatggataaagaagttcatttcataataaaaaggaactatttcataaaaggacacccgagtataaagcagtactgctaaaatgcaaggaggaataaaaaaaattcacaattatagttggatattctgatacccctttctcatagacagaaagtcagtaaagatatagaatctttaaatagcactatctaccagcttgacatttattaaaaacaaaaacaaaaaatctccacctaacagcagagtacacattcttctcaagtgcacataaaacatttaccaaaatacaccttattctgagccataaagtacatcttaatgaattttaaaaggtttaagtcatacaaaatatgttctctgactacagaggagttaaactagaaatcataacagaaaatcattctagaaaagcttcaaatatgtggaagctaaataacacaatccaaaattactcatggctcaaacatataaaaagggaaattaaaatgtattatgaatgaaataaaaatgaatgtaaaacgtatcagaatttgcagcatatcactaaagaagtagttgggggaaatttacagcactaaatgcctatgtttgaaaataagaaattagcatctaaagaagctagaaaaagaacaagaaattaaatctaaaatgagtagaggaatagaaataattaagattaaagtagaaatcaatgaaatagaaaccaatagagaaaagcaatgaaataaaaaagaaacttgttctttgagaagtccaataaaa

SEQ ID NO: 1898 - DNA, 3786 bp, Homo sapiens
  source 1..3786: mol_type = other DNA
aataaaaaaggctgaaactggagttatggttgtggatgagatggagtaaacatgtttcaccttttctctcccactgaatataactataaaacccaaatagaatgcatgatggcaattattggaagattctggaaagtaaataggagcaggcagattggaacaaaacagaatttgaagcataatctaatttgtggtgaatttactattttcgatcttcgatgtaccccaacttgaactcaatgtgcctgttaacctggaagtgagcactatagttcagatgggaaagggtttcaggagaagcctctgtccttggtttgaagcctaggaaaggaagcccctaatgctcagggagaatgtgaaaatgccctcattcctgttttcctatcttttcttttcttcattcttttatttcctagcccactcaagcaattctgaatggtagcagtggcagcagctatgaaaaccccaaaagccaaaactctgaggaagaggaccactcctttccatttggtggagctgttgttccaagacagtgggacaaacccctgttgattccctgcctctgttcttctgctttggccaggacacaggtttagtcatgaaagtgtgtgacacagagtgtgacacagcagggtaactagaactccaagtgtttgtctagtggaccatgtaggggaggcccagggaacgggaaagtactggagagatcttgggaagggaggggcttgtgaaatcaaccctataaagttgttcatgagcaccaagctcacctttaagctgcacaaatataggtctgatcctcatttgcataccaaagactttgagaactgaactaatagactgtccaagtctcagactgaccatttggcagtacacacttaggaaagatccaaaaagcatgacagaagctttgaaaattgaactgactttggcatcacagtctatagagagtgtactgaaacttgtagcttgtacatactcagtcaattgcctgccaaaaccaaatatcaatattctccacagaacttaaacaagacccagagtgccatgatataatattcaaagtgtctagaatgtaatccaaaattacttagtgtacaaagaaccacaaaaatcttgactcacatggaaaaagacaaccaatatatgttaataccaaaagtatacagacattagagttgtctgacaaagactctaaagcagttatttcaacaatttttgaaggaacagtcgtgctcttgcaacaacagttaaattagaaagcctcagcaaagaaattgataatataaacaaaaacaaaatggaaattttagaattaaaaaatacaattaccaaaaaaattaaaaggctttctggatagacttaataacaaaatggagatgaaagaagaatcagtgaacttgaagatagatcaatagagattactggatctgaaaaagatttttgaacaactggaaaaagaattagtagagcttcagggacctgtggagcaataaaaaaaatcgaattttctgatcttcagagtctcataaagaaagggaaaaatgcaatgctgaaaaacatttgaaaaaataatgccccaaatcttgcaagtttgttaaaagacaaaaacttacttaagtttatacttattaagaagttgagcaaacctcatacagtataaactcaaagaaatccatgtgcagagacattgtaatcagactgctgaagtcttaaaacagccagattaaaataatgcattaacatgtaggggaatgattatttgaatgactggatttgtcatcagaaagcaaggaggcagggaggaggaggcacaatatttttaaagtactgaaagaaaagaagcgtcaacctagaattttgtttctagctaaaatattcttcaggattaatggtgaaatgaaaatttctcagatgaagaaaaaaagagtttataggcagaagacctattctaaaaggattgctaaaggaagcttttcaaacaaaagtgaaaggatactgaaaggaaaggtagaacatcaggaattaaaaagacatggaaaacatctcggtaaatataataatagaatattcttatcctgttgagttcttaaaaatatgtttggctgttaaaagcaaaaattggaatttgtgtgatgaggttctcaatgaatgtagttgtaattcaagacaactgtagcgtaagtggacaggctaaaggaatatacaaagcggtagggtttctgtgttccaattgaaatggtgatatatggagtctaaaaaacccgcaaaaaattaaatgtgtatctcaagtgaaatgactacaaataccatacaaaataagaatagatacactaaaatgaaatattttaaaaagccttaaataaccaaaagaaggcagaaaaaacacaggaatcaaaaaaaaaaaaaaaagacaaaataaattgaagaatgggaacctaaatccaaacatataaatagttacattaaatgtaaacgatctaattgcaccaattaaaagacagatagaatagatttaaaaacatgacctaacttacgtattgtgtacaagaaactcacttcagtttgatacataagtaggttaaaagtaaaagaatggaaaaatatgtaccatgcaaacactactataaagaaagctggggtagctatgttaatttcaaataaagaagactttagagcaaagaaaattactagaaataaaaagtgctattacatactgctaaaaggattaactcaagaagaatatacaaatactagatgtatatgccactaataatagagctttaaggtatataaagtaaaaactaacagggatgaaaggagaagtagacacatctataattataattagaagcttcaacattcctctctcagcaataggtataatgagtagatggggaatgagcaggaatatagaagaactgcagaatgcttcaaccaactggatctgtcacaaaacactctacccaagagcagcagaatagacattcttttcaagtgtatggaacattcaccaagacagaccatcacatagattataaaataagccttaaaaattgaacctcattgaaatagtacaaagtatcttccgagtctacaagaaaattaaaccagaagtagtggcagaaagataatatctctaaatacttggcaattaatcatcaaattttaaaataatgggcaaaagagaaagtctcaaaggaattagaaaatagttggaagtaaatgaaaatcaaaatacaaattgtaggatgaagttaaatgtttagagggacatttatagcactaaatatgcatattttaaagagaaaaatggccttaaagaacttaagcttctaccatgatacacttgagaaagaacaaattaaactcaaatcaataagaatgaaggaaattataaagacaaaagcagaaatcaatgaacttgaaaacaaaaaatagagaaaaatcaaagaaactaaaaattggttctttgaaaagatcaatgcaatttgtgaagctctggcaagaaaacagagaatgcaagtgattgatatcaggaatgaaagaagggacattactatcaactctaacattagaaggaaaataagaaatacgacaaacagttctactcacataaattcaacaaattagatgaaatgaattagtcctttaaaaaccacaaactcccaaaactcacctcagatgaataggtagcctcaatagttctataaccattgaagtaattgaatttgtagttaaaaacgttctgaaagagaaatctctaagccctgttggattcactgg

SEQ ID NO: 1899 - DNA, 60 bp, Homo sapiens
  source 1..60: mol_type = other DNA
gtttaaatcagtactttgcatataataagcattcaacaaaaatttattgactgaaatgaa

SEQ ID NO: 1900 - DNA, 299 bp, Homo sapiens
  source 1..299: mol_type = other DNA
ccaggcgcagtggctcatgcctgtaatcctagcactttgggaggccaaagcgggcagatcacctgaggtcaggagttcaagaccaaccatggccaacatggtgaaaccccatctctactaaaaaaacaaaattagctgaatgtggtggtgcacgcctttaatcccagctactctggaggctgaggcaggagaatcacttgacttgggaggtggaggttgcagggacccgagattgtgccactgcactccagcctgggtgacagagcgagactgtctcaaaaaaaaaaaaaaaagaaaaa

SEQ ID NO: 1901 - DNA, 502 bp, Homo sapiens
  source 1..502: mol_type = other DNA
gtagccagcctccaagaggcctcaaagagccccacctccgggtattcacacccttatacagtcctctcccacactatactagggttagtctgcgtgacaaatacagtgcagcagaaatgttggtatgtcactcgcaggattagatcataaagggaccacagcttctgtcttggtctttcggtctcagtgtctgtttcatcactccttctgggggaagccagatgctacaccctgagaaaaggcccaggtagtgaagagctgaggtctcaggcaagcagccagcaaggaacagcagcctcttgctaacagttgtacaaatgagcttgtaaagtagatcctctagccccagtgaagcgttcgggtaactgcaggcctggccaacatgtagactgcatcctcatgagagccctgagttggaccacccagctaagctgcttctgaaatcctgacttgcagataagacaagaaatgttgttttaatttgttacatagcaaaaaaaaa

SEQ ID NO: 1902 - DNA, 235 bp, Homo sapiens
  source 1..235: mol_type = other DNA
cttgcccatgagtctctttgacccttgcccatttcctttctagtacatatgaccatttataattattttatttttgctttttctcctactggaatataagctccgaagggcagagaccatgcctgtctgttcaccactgtgtccccacagtgtctagaacataatgttctagtgtcttgaacagtgcctggtcaatagtaggttctcaattaaaagcttttattaaataaacgaa

SEQ ID NO: 1903 - DNA, 324 bp, Homo sapiens
  source 1..324: mol_type = other DNA
gaacatgtccagagggcatgaccaggagagtaaaggatttggaatccatacatagtgaaatggttggacattgactctatttagcccagaaaagggaagatttaaagaggattggtgactggcctcaaatacttgaagaactagtgatctgttccatgtggccccagatagtaacgctacaattggagagtggagctcccaaagaggtatgtctagaccaatataagcaataactgccaactagagggagctggctggaagcaatgagttcctcatcccaggggacttcaaggggaagcttgatggcagctcctctgatgatat

SEQ ID NO: 1904 - DNA, 299 bp, Homo sapiens
  source 1..299: mol_type = other DNA
ggccgggcgcggtggctcacgcctgtaatcccagcactttgggaggcagaggcgggcggatcacgaggtcaggagatcaagaccatcctggctaacacagtgaaaccccgtctctactaaaaatacaaaaaattagccgggcgtggtggcgggcgcctgtagtcccagctactccggaggctgaggcaggagaatggtgtgaacccgggaggcggagcttgcagtgagccgagattgtgccgctgcactccaacctgggcgacagagcgacactccatctcaaaaaaaaaaaaaaaaaa

SEQ ID NO: 1905 - DNA, 305 bp, Homo sapiens
  source 1..305: mol_type = other DNA
gccgggcacggtggctcatatctctaatcccagcactttgggaggccgaggcaggtggatcatgaggtcagtagatcgagaccatcttggctaacacggtgaaaccccgtctctactaaaaataccaaaaagaaaaaaaaaaaatcagccagccgtggtggcaggggcctgtagtcccagctactcgggaggctgagacaggagaatagtacgaacctgggaggcggagcttgcagtgagccgagatcgtgccactgcactccagcctggacgacagagcgagactgcgtctcaaaaaaaagaaa

SEQ ID NO: 1906 - DNA, 220 bp, Homo sapiens
  source 1..220: mol_type = other DNA
cagtatgatgcaatgctaagcacacagcctctggagccaggctgcttggcttcagatgccagtcctgccacttactagctgtaaaaccttactgtgtttccatttcctcagctgcacaataaagataattgcaataccttctttataggattattgtgaaaattaaatgagtgaatacctgtaaacctctcacaacactctctggcattcagtaaagtgc

SEQ ID NO: 1907 - DNA, 1438 bp, Homo sapiens
  source 1..1438: mol_type = other DNA
aaacaatcttgaaaaagaaggacaaatttgaagttcttacatttcctaacttcaaaccttattataaagcgacaataatcaaaatagtggatactggcataaagacagatatatagaccactgtaatagaatagaatccagaaataaactcttacatacttgctcaaatgatttttcacaaggtgctaagactatccaatgggaaaaaggcagtgtttttaataagtggtgtggggaaaattggatatccacatgcaaaaaaaaaaaaaaaatgaagttagacacttacctaactccatatccaaaaatgacctcataacagatcaaagaactaaatacaaaacctaaaactataaactcctgggagagaacacagggggaaccctttgggacactggaattggcaatgatttctcagatatgacaccaaaagcaaaggaaacaaaagaaaatataggtaagttggaaatagttgtgtctcaaaggacacaaggagtgaaaaggcaacccacccaacagtatgaaatatttgaaaatcatatatctgataagagactgatatccagaatatataaagaactcctacaactcaacaacaaaaacacccaattttaaaaatgggcaaagacctgattagcagcgagggtacacaaacagccgataaacgtatgaaaagatgctcagcatcaccagtcattagggaaatgcaaattgaaaccacaatgagataccactttatacatttacgatggctatatttttaaaaatcagaaaataataagtgtgggcgaggatgtggagaaattggaacccttgtgcattgctgtgggaatgtaaaatggtacagctgccatggaaaacagtatggtgatccctcaaaaaattaaacatagcattgccacatgatccagcaactccacttctgggtataataccccaaagaagtgaaagcggagacttacaaagatatttgtacactcgtgtttataatcactttattcacagtagccaaaagtattcatcaatgggtgaatggataaacaaaatgcgatatacatacatcagagtattatttgttcttaagatgaaaatgttgacacatgctacaacatggttgaatctcaaagacattatgctaagtgaaataagccagtcacaaaaggacaaatattatatgattgcacttatgtaagaggttcttagcatagtgaaattcatagagaaaggaagtagaatggcggttgccaggggctgggaggaaggggaaatggggatgttgtttaatgggtttagagtttcaatttgggaagatgaaaaagttctggagatggatggtggtgatagttgcacaatagtgtgaaagtacttaatgccacggaattacacacttgaaaatggttacagtggaaaatgtcatgctgtgtatattttgccacaa

SEQ ID NO: 1908 - DNA, 1803 bp, Homo sapiens
  source 1..1803: mol_type = other DNA
agaggggaatccttgaaatctgtatttaaattccacctgaaatgcttggctaatccctgaactgtggatgcatgggagagactccaaggagctcagcagaaagaaacagctgttaacagtaaaataaataagcagagatatctgcatctgccaagtgaagaggagttagagcttgagtcctatcagtatgaattactttatagataccttggaatttccaaaatccaccctaacaaagtagaatgctaagccacatgagatatgtggagaaatagaaaatgaaatccatagtttaaaagaaaaaaggaagaaaaatcaagcaacagaaacaccctgagatgagccagatgttggaattagcagggaaaggcctcaaaacagctatgataaagatgttcaatgacttaaaggaaaaaatgatcatcatgtatgaacagatggggaatttcaatgaagaaatgaaagctataaaaaaggcatcaaatggagataatagaacagaaaagtatatttataataagcatcaatttaatgggcttaacaatatactggagtaggcggaataaaaaattcggaaggcatcaataataattattcaatctgacagagagaggaaaaaagtttaaaaatgaacagagattcagtggcctgcaagaaataactaatcagcctaatatacatttaattagagtagaacaaggaagggaaagcaagaatcatgcaggaaaaaatatttgaagagatggtagtaaaaatgctcccaaatttggttaaaaaattataaatccaagttcactgaactccaagcagaataaaattttcaaaaaacagcagaagtacacatacatatgacagtcaaagtcctaaaaaccaaagataaagataatattatgaaattagtcacaaaaagacatatatacaggggagtgacactataagtaacagctgacttctcaccaaaaacaaaaaaggaaagatggtaatggaatcaaatttttaaaatactaaaacaaaaataaaactcagaattttacatccaaagaaaatatccttcaaaaattaacggaaaagaaagacatttttagataaatagaagctaagacaatttgtttccaggagatttatactacaggaaatgttaacaggaatatttttagtgtcaagcggattgaaacaagattgcaacttgaaaccacagaaaggaataaagaccatctgaaatgggcataaatacatatatgtgtgtgtgtgtataatatataacagattgtatagtttccctccttaatttatctaaaaggcatatgattattaaaggcaaaaattatagcactatattatggaacttacaacatatgaagatttaatatatatgataacagcacaaaattaaaggtgggagaaataactgaatggttgcaaggttctgatatttgatgtgtatgttagctgtaggcagactgtgatcaattagaacatagactgtgtatattgactatgatcgattaagaacatataatctctagggcagctagaataagtactgtaatatataaaatactgtaataaataaaaattgtaactaaatactcaatagataaattataattaaatagtaaaaattacaaacaagcaataagcaggtggaataaatagaaaaatggtagccttaaatccaaccttagcaaaaattatattaaattcaaaagtgtaactactccaattaaaaggtaaagactagcagacggaataaataagtcccaactataattatctataaaaagtgtattttaaatataaaga

SEQ ID NO: 1909 - DNA, 221 bp, Homo sapiens
  source 1..221: mol_type = other DNA
caggttgagtattcttaatccaaaatgctacaaaatctggaactttgtgagcaccaatatgacactcagagataatgctcattgaagcatttcagagttcagattttcagattagagatgctgaaccattataatgcaaatattccaaaatccaaaaaaaaaaaaaaatctgaaacacttccagtcagtcccaggcattttagataatgaatactcaacct

SEQ ID NO: 1910 - DNA, 99 bp, Homo sapiens
  source 1..99: mol_type = other DNA
gtcttttacagaagtggataaaccaaagatagactgagggccacatattattagaaaaatggcacagtgtatttgtttctgaaggtaaaaactattcct

SEQ ID NO: 1911 - DNA, 305 bp, Homo sapiens
  source 1..305: mol_type = other DNA
gccaggcacagggctcacatctgtaatcctagcactttgaggccagggtgggcggatcacctgaggtcaggagttcaaaaccagcccggacaacatggcaaaaccctatctctactaaaaatacaaaattagccaggcatggtggcacatgcctgtaatcccagctactctggaggctgaggcaggggaattgcttgaacccgggaggtggaggttgtgctgagccgagactgcgccattgtattccagcctgggcaacaagagtgaaactccgtctaaaaaaaaaaagaaaaaaaaaaaaaaaa

SEQ ID NO: 1912 - DNA, 794 bp, Homo sapiens
  source 1..794: mol_type = other DNA
gcaactcaatggaaaagtgggtaaatgacttagcagacaccacatcaaagatgatattcaaatgaccagaaaatataaacacatgcttaataccattagttatcacaacactgtgataccactgtacacccaccaggatagctaaaatgaaaagacaaataatagcaagtgctggtgagaatgaggagtactactgggagagatgtaccatggcaccaccatcatctggtaacttttgcaggatatactaacagagcatttgtgtacctgagcacccagtgattgccctcctagggatacaaccaacagaaatgcttacatttatgcaccaaaagacaggtgctataatgtttatagctgcactactcttagtagctcaaacctggaaactatcaaaaggctcaccaatgacagaatggataaattgtgaaacattcataaaaatggaataccatacaacagtcagaatgatctaaagctatatgcaacaatataagtggatccaaaaaacatatctttgagcaagagaagccatgcataagagtgcatactgtatgatgacatttatatgaaatagaaacataggcaaagttaccatgctgctagaaggttatccttgccaagagtgtggtgtgggcgctctggactggaagggagcatgcagggggcttctggaggctgatgatatcctgatattctgttcttctgatttattgctaattacacaggtgtgatcagtttgtggaaattcattgaaatgtacattcatgatttcttcactaaaaatttctgta

SEQ ID NO: 1913 - DNA, 208 bp, Homo sapiens
  source 1..208: mol_type = other DNA
aagaacccaggctttggagcctgaaaatctcaacttcttcctcttgagtgtgtctttggtaagttatttatcccatctgtacctcggtttcctcatctgtgaaacaggcaacacaccacctcctatagttatagagcaggatcaatgagattgtctttgaaaagttgcccagcatttgcaggtatttaataacaatatcttttattat

SEQ ID NO: 1914 - DNA, 456 bp, Homo sapiens
  source 1..456: mol_type = other DNA
tatttccaccatggctagacacgaagaggctttagcaacatattctgtcgtgccactcctctgctcaaaaccctccaatttttcccacgcttctcagcctgtcctacatgacctcttccattttggccccttcgacctcattgcctcccacttactccctctgctccagccacactgcttcttactgttcctcaaacgacgccaggcacctccctactccagggcctttgcatttggtgttcattcagcctgaagctctcttccccagttacctgagatccgaatgggtcacttacctgcatccttcagctctttgctcaggtatcatctttgcagcgccacccacccagacacccgctagttccctctcagctttattttcctcagtagtatttatccctgtgtggcatgctatatattttaattatgttattttttgtatttatctattgctcc

SEQ ID NO: 1915 - DNA, 230 bp, Homo sapiens
  source 1..230: mol_type = other DNA
agcggttctccactgcaacagttttgcctcccaggagacatttggcaatgtatgaatcattttcagcctctcatctggggtgagatgtcattggaatctacagatggtggagggcacaggtgagtagaggccgggaatactgcttcacgccttacagtgcgcaggacagcgccgcacaacaaagaattacctggcctgaaatgtctggagtgctgaggtttagaaacctt

SEQ ID NO: 1916 - DNA, 387 bp, Homo sapiens
  source 1..387: mol_type = other DNA
attttaaactgaacatgctcaaggctgaactcatggcattcctttccaaatctctgtgctccctcttccctcctttctgcccttcctccaggcaatcgccatagtagtaaaaggctcttccatcccaggtacacataccagacacacgggagaaatccttagcattgccctcttcctcacctacacatctcatcacctcgaaatgttcattttgtctcgaggatatgtcttcagtctttccacgtctctccatctccaccctccactgctccggtagtctattcgccaccacctcttcctgctccaggagcctcctaagcactctcctttatccattcttgttctttccaatgcattctttattcagtaagcagaaagatttttgaa

SEQ ID NO: 1917 - DNA, 635 bp, Homo sapiens
  source 1..635: mol_type = other DNA
gttctcagcaagggtattcctagcctctaggggtactttagaaatttgtggatgtattcgtggttttcacagtattagggggtggtttgccattggcatttagtgggtggtgccaagggtgctagaaatcaggcaatgtacagggcaattgctccacatcccatttgactttcaaatgcctgccaggcaacagagaaataaaaaatttattggtagtcatcagagcctaaatgatctctataagcaaaaggtattttttgcacaatttaaatggagggaatcctgtattttgtttttttttttttgttttgttttttttgagactttaccaggagttgtttcccatgttggcatcattacttgtggttttgaaattggcgtatcagtcagcatgtgtagctgccccattcatggtgattgtagcctaggggcaagaagctgactacctcattgtgttttctacagctcctgtgcctggacatttacatagtgtagtgtatattgtatcattataagttctttcccttttatttctcctttatattgcaactaggtcatagcattgatttattaaaattatatgcagattaggttatattgtctgtgatttctcatttcaggattgcagagggggc

SEQ ID NO: 1918 - DNA, 492 bp, Homo sapiens
  source 1..492: mol_type = other DNA
aacagcctctcagagatgtgtatgtcctaatctccagaacctgtgaaaatgttatgttacatggagtagggggatttaggttgcagatgaaattcgttcttggttgagtttaaaataggaagattatcccagattattgtagtgggctcaatgtaatcacagcgcctttataagtggaagttggaggaggaagagtcaatgagagagacgtgatgtgagaaatactcagccagccactgctgacttcaaagatggagaaaggggctatgagccaaggaatgcaggcagcctgaagaggttggaagaggcaaggaaagagattctcccctagagcctcccgaagatgtgaagccctgctgacactttgatcttagtccagtgagacccatttcagacttctgaccttcagaactgtaagataataaaagtgtgttattttaagccactaaatttgtggtaatctgttacagcagccaattggaaaagaataca

SEQ ID NO: 1919 - DNA, 310 bp, Homo sapiens
  source 1..310: mol_type = other DNA
gccaggcgcagtggctcatgcctgtaatcccagcactttgggaggccgaggtgggcagatgacttgaggtcaagagttcgagaccagcctggataacatggtgaaaccccatctctactaaaaatacaaaaataagctgggcttggtggcaaatgcctgtaatcccagctactcaggaggctgaggcatgagaatcacttgaacccgggaggtggaggttgcagtcagatgagattgcgccactgcatttcagcctgggtgacagagtgagactctgtctaaaaaaaaaaaaaaagaaaaaagaaaagaa

SEQ ID NO: 1920 - DNA, 525 bp, Homo sapiens
  source 1..525: mol_type = other DNA
cagagtacaaattcacccgtaagattttagattccatgtcgcaagtaacctttaagaaacgaccagttgtcaagttttagtgtccgtcaaagaacatcaacaattgtctaagaaggctattgaaatactgcttccttttccatctacatttctgtgagcctggattttctttatatactttaaagagcatatcctaacagattgaatgcagaaggagatatgagaatctagctgactgcaattaacagatacatgaaagagttttgtaaaaatttaaaaactgtggctcttctcacaaagtttttttctggaaaagataatttttttcataaaacatgtaatttatgttaacatataatggggttattgttattttaaaataaattaatgaatacatattttttaagtttcttggttttgtaatatggttcatctcagttataatccacataaacaaaactctttggtgttatcagtaatttttaagagtgtaaatgggtctaaagactaaaaagtttgaggacc

SEQ ID NO: 1921 - DNA, 128 bp, Homo sapiens
  source 1..128: mol_type = other DNA
aatctcaggtatttcctcaactgcaaaatggaagtaatgacatctgccctacttactttaagaggtttgctgtgtgagaattaaatgaggtaaagcagccaaaaattgccatgtaaattataaagctg

SEQ ID NO: 1922 - DNA, 245 bp, Homo sapiens
  source 1..245: mol_type = other DNA
tcagagcacaggagatgtatttgactcctcaagttgcaactctgaattatttcacacggaaatacctgtggtcctttagaattgatggcactgtaagtactatgtttcaggaacatcctgggctaagcagatgtttgtggattgacataggtccctgatcacctcttatagcatgatttcttaaaagggtgttccaggttccacacaacctatttataaatgaacttttagaacacaagtcattc

SEQ ID NO: 1923 - DNA, 120 bp, Homo sapiens
  source 1..120: mol_type = other DNA
aactccccacgcctacgctgcacgacagaccagtcaaatcagaaccatgagggctgaaaccagaaattagtgatgtcaaagctccaggaggattcctaggggagccacagttgtgaccca

SEQ ID NO: 1924 - DNA, 156 bp, Homo sapiens
  source 1..156: mol_type = other DNA
tgctcctcaaagggtgtctgtgcatcagcagcactggtggcatcacctgggaggtgttagatacacagattctcaggccccaccctagccctgctgaatcagaacctgcatttcaacaagaaccccaggtatacatgttaaagtctgagaagcact

SEQ ID NO: 1925 - DNA, 106 bp, Homo sapiens
  source 1..106: mol_type = other DNA
aggattggttgttttccgtcacctccactagactgtcagccctgtgagggcaggacctgtttggtttaacactcttctcccagctcccatgagtgcaccagccctg

SEQ ID NO: 1926 - DNA, 121 bp, Homo sapiens
  source 1..121: mol_type = other DNA
agttcatgaagattacactgaggccctattgagaagctggaagtgggagcaataagatggccctctgagagcaaaaacataggagcaataccaggtatagatgggcagaccagcagagatg

SEQ ID NO: 1927 - DNA, 930 bp, Homo sapiens
  source 1..930: mol_type = other DNA
cgtatatctgataaggggttaatactcagaatatataaagaactcctacaatgcaacaacaaaatacaatctgattttaaaaattgggaaaggacctgaatgaacatttctccaaagaagatatacaaatggctaataagcacatgggacgatggccaacatcacccatcattcgggaaatgcaaattaaaaccacaatgcaatatcatctcatattcattgggatggctactattaaaaaacaagacagaaaataacaagggttggcaaggatatggagaaattggaacccttgtgcattgctagtgggaatgtaaaatgatgcagctgctatggaaaacagtatggcagttcctcaaaatattaaaaatagaatcaccatatgatccagcaattccacttctcgatatatacccaaaataattgaaagtaggatttcaaagagatctttgtaaacccctgttcatagcagcattattcacaatagccaaagggtggaagcaacccaagtgtccactgatagatgagtgggtaaacaaaatgacatatatacatacaatggaatattattcaacctccaaaaggaagaagattctgacacatgctacaacatgatgatgcttgaggacattatgctaatgaaataaaccagacacaaagggataagtcctgtatgattccacttatatgaggtatctagaagagtcaaattcatacagacagaaaatagaacagtgggtgccaggggaaggaagtaatggggcgtgattgtttaatatacacacacagtttcatttttgcaagattaaaagagttctaaagatggatggtggtaatggctgcataacaatgtgaatgcacttcataccactgaactgtacacttaaaaatggccaagttgataaactgtattttaccgcaattgaaaaa

SEQ ID NO: 1928 - DNA, 297 bp, Homo sapiens
  source 1..297: mol_type = other DNA
gccaggtgcaatcgctcacgtccgtaatcccaacactttgggaggccgaggtgggcagatcatctgtggtcaggcgttcgagaccagcctggccaacatgacaaaaccatctctactaaaaatacaaaaattagctgggtgtggtggctcatacctgtaatcccagctacttgggaggctgaggcaagagaatcacttgaacccaggaggtggagtttgcagtgagccgagattgcaccactgcactccagcgacagagcaagactccatctcaaaaaaaaaaaagaaaagaaaaaa

SEQ ID NO: 1929 - DNA, 466 bp, Homo sapiens
  source 1..466: mol_type = other DNA
gtggtttaaaatatgttaactatttatttgacacacctctttgaaaggtggagcctaattcccttccttctgagtgcaggttggattcagtgagtcactttcagtaaatagaatgtaggggaaatggcggtatgtgactttatggattaggttataaaaggcattatggcctccccttgctgtctccgagtactcactctggggaaagccagctgccatgttgtgacatcatgcaagcaacccaatggggaggtccttgtagtgaggaaccgaggcctcgtgccaatacctagcaccaagttgccagccatatgagggaaccatcttggaagcagatctcctagcccagataagcctttggacaactgcagcccacataccattttgaggaatcctaagccagaatctctcatatttctgacccacagaaactgtgtaacatgtttattgttttaagctgctaagt

SEQ ID NO: 1930 - DNA, 170 bp, Homo sapiens
  source 1..170: mol_type = other DNA
ggaagagaaaatagtttttatcttgcacattatctacaacccactgggagtggctgcctgaatctctgaactaaaaaggagcctgaccctttatccaaggctcagtacagaaaagggctgtaattgattagcaatgtctgccacagaaacactaggaaacaagtgtggca

SEQ ID NO: 1931 - DNA, 207 bp, Homo sapiens
  source 1..207: mol_type = other DNA
ggccaggcccggtggctcatgcctgtaatttcagcattttaggaggctgaggtgaacagattgctcaagtccaggagttcaagaccagcctgggcaacatagtgagatgcggtctctacaaaaaatttttaaaagttagccaagcatggtggtgcttgcctgtggtcccagctacttgggaggctgaggtgggaggattgcttgagc

SEQ ID NO: 1932 - DNA, 291 bp, Homo sapiens
  source 1..291: mol_type = other DNA
ggccgggcatggtggctcacgcctgtaatcccagcactttgggaggccaaggcgggcagatcacaaggtcaggagttcgagaccagcctggctaatatagtgaaaccccatttctactaaaaatgcaaacattagtcaggcatggtggcaggtgcctgtagtcccagctacttgggaggctgaggcaggagactctcttcaacccgtgaggcagaggttgcagtgagtcgagatcatgtcactgcacttcagcttaagcaacagagcgagactccatctcaaaaaaagaaa

SEQ ID NO: 1933 - DNA, 128 bp, Homo sapiens
  source 1..128: mol_type = other DNA
ttattggagacattcaagcaaaggttggacaactacttttccagaacagaaaggaaactcatgcatcagaaaaggttagagcttgatgactgataagatctccctttattcttaagttccctggttct

SEQ ID NO: 1934 - DNA, 65 bp, Homo sapiens
  source 1..65: mol_type = other DNA
gcctgattcttacctgaaaaatgaggtaatatgattactaagtccccttcaagttctaatagtct

SEQ ID NO: 1935 - DNA, 5762 bp, Homo sapiens
  source 1..5762: mol_type = other DNA
gcaagatggctgaacaggaacaattccattgtgcagctcccagcgagatcaatgcagaaggtgggtgatttctgcatttccaactgaggtacctggctcatctcattgggactggttagacagtgggtgcagcccacggagagcaagcagaagcagggtggggcgttgcctcacccgtgaagtgcaaggggtcggggaactccctcctctagccaagtgaatccatgagggactgtgccgtgagaaacggtgcattccggcccagatactatgcttttcccatggtctttgcaacctgcagaccaggagattccctcaggtgcctacaccacgagggccctaggtttcaagcacaaaactgggcagccatttgggcagacaccaagctagctgcaggagttttttttcatacttcagtggcacttggaatgccagcaagacagaaccatttgctcccctcgaaacagggctgaagccagggagccaagtggtctacctcagcggattccactgccacggaacccagcaaggtaaagatccactggcttcagattctcactgccagcacagcagtctgaagtcgacctgggatgctcaagcttggtcgggggaggggcgtccgccattactgaggcttgagtaggcggttttcccctcagtgtaaacaaagccgccaggaagttggaactgtgtggaacccaccatgtctcagcaaagccgctgtagccagactgcctctgtagattcctcttctctgggcagggcatctctgaaagaaaggcagcagccccagtcaggagcttatagataaaactcccatctccctgggacagagcacctgtgggaaggggcggctgtgggtgcagcttcagcagacagatgttcctgcctgccagctctgaagagagcagcaaatctcccagcatagcgctcaagctttgctaagggacagactgcctcctcaagggggtcgctgacccccatgcctcctgactgggagacacctcctagcaggggttgacagacacctcatacaggagatctatgactggtatctggtgggtgcccctctgggacaaagcttccagaggaaggaacaggcagcaatctttgctgtttggcagactctgctggtaatacccaagcaaacagggtctagagtggacctctagcaaactccagcagacctgcagcagaggggcgtgaatggtagaaggaaaactaacagaaaggaatagcatcaacatcaacataaaaggacacccacgcagaaaccccatctgaaggtcactaacatcaaagaccaaaggtagataaatccacaaagatgaggaaaaaccagtgcaaaaagcctgaaaattcccaaaaccagaacacctcttcttcaaaggatcacaactcctcgccagcaagggaacaaaactggatggagaatgaatttgatgaattgacagaagtaggcttcaaaaggtgggtaataacaaactcctccgagctaaaggagcatgttctaaccctttctattccttcaaattagctctggaaaggactacagaaagctggactgtaatttccctttgcttactcaggtcatctaaacctaaatagtctgagtatattgccttaatcagaatcacattttcccctctttaattccttcccccataataaaggaagctaagaaccttgaaaaaaggttagacaaattactaactagaatcaccagtttagagaagaacataaatgacctgatggagctgaaaaacacagctccagaactttgtgaagcatactcaagtatcaatagccagattgatcaagcggaagaaaggatatcagagattgaagatcaacttaaagaaataaagcgtgaagacaagaatagagaaaaaagaatgaaaaggaatgaacagtgtctccaagaaatatggggctatgtgaaaagaccaaacctacatctgattggtgtacctgaaagtgacggggagaatggaaccaagttggaaaacactcttcagaatattatccagaagaacttccccaacctagcaagacaggccaacattgaaattcaggaaatatagagcataccacaaagatattccttgagaagagcaacctcaagacacataatcgtcagattcaacaaggttgaaatgaaggaaaaaatgttaagggcagccagagagaaaggttgggttacccacaaaaggaagcccataagactaacagtggctctctctgcggaaaccctacaagccagaagagaatggggggccaatattcagcagtcttaaataaaagaattttcaacccagaattttatatacagccaaactaagcttcataagtgaaggagaaataaaatcctttagggacaagccaatgctgaaagattttgtcaccaccaggcttgccttacaagaactcctgaaggaagcactagacatggcaaggaaaaacttgcaccagccactgcaaaaacatagcaaattgtaaagaccattgacactatgaagaaactgcgtcaactaatgggcaaaataaccagctagcatcctaatgacaggatcaaattcacacataacaatattaaccttaaatgtacatgggttaaatgccccaattaaaagaaatagactagcaaataggataatgagtcaagacccatcggtgtgctgtattcaggagacccatctcacatgcaaaggcacagataggctcaaaataaagggatggaggaatgtttaccatgcaaatggaaagcaaaaaaagcatgggatgcaatcctagtctctgataaaacagactaaaccaacaaagataaaaaaagacaaagaaggttattacgtaatggtaaagggatcaatgcgacaagaagagctaactatcctaaatatatatgcacccaatacaggagcgtccagattcataaaacaagttcttagagacctacaaagagacttagactcccacacaataatagtgggagactttaactccccactgtcaatattagacagaacaatgagacagaaaattaacaaggataatcaggacttgaactcagctgtggaccaagcaggcctaatagacatctacagaactctccaccccaaatcaacagagtatacattcttcttagcaccacatcacacttattctaaaattgaccatataattggaagtaaaacactcctcagcaaatgcaaaagaacagaaatcataataaacagtctctcagaccacagtgcaatcaaactagaactcaggattaacaaactcactcaaaacggcacaactacatggaaactgaacaacctgctcctgagtgactactcggtaaataatgaaattaagacagacataaataagtgctttgaaaccaatgagaacaaagacacaacgtaccagaatttctgggacacatttaaagcagtgtgtagagggaaatttctaacactaaatgcccgcaggagaaagcaggaaagatctaaaattggcaccctaacatctcaattaaaagaactagagaagcaagagcaaacaaattcaaaagctagcggaagacaagaaataactaagatcagagcagaactgaaggagatagagacacacaaaacccttaaaaaaatcaatgaatgcaggagctggttttctgaaaagatcaacaaaatggatagaccactagctagactaataaagaagaaaagagagaagaatctaatagacataataaaaaatgataaaggggacatcaccactgatttcacaaaaatacaaaccaccatcagagaatactataaacacctctacacaaattaactacaaaatctagaagaaatggataaattcctggacacatacaccctcccaagactaaaccaggaagaggtcgaatccctgaatagatcaataacaagttctgaaattgaggcagtaattaatagcctaccaaccaaaaaaagcccaggaccagacaaattcacaggcgaattctaccagaggtacaaagaggagctgctgctattccttctgaaactattccaaagaatagaaaaagagagactgctcccttactcattttatgaagccagcatcatcctgatacgaaaacctggcagagacacaacaaaaaaaagaaaatttcaggccagtatccgtgatgatcatcagtgtaaaaatcctcaataaaatactggcaaaccgaatccagcagcacatgaaaaagcttatctacctcaatcaagtcagcttcatccctggggtgcaaggctggttcaacatatgcaaatcagtaaacatgatccatcacataaacagaaccaataacaaaaaccatgtgattatctcaaaagatgcagaaaaggccttcagtaaaattcaacgccccttcatgctagaaactctcaataaactatctattgatgaaacatatctcaaaatagtaagggctatttatgacaaacccacagccaatatcatactgtatgggcaaaagctggaagcattccctttgtaaaccagcacaagacaaggatgccctctctcaccactccgattcaacacactactggaagttctggccagggcaatcaggcaagagagagaaataaagcatattcaaataggaagggaggaagtcaaattgtctctgtttgcagatgacaagattgtatatttagaaaactccatcatctcagcccaaaatctccttaagctgataagcaacttcagcaaagtctcagggtacaaaatcaatgtgcaaaaatcacaagcattcctatatgccaataatagccaaatcgtgagtgaactcccattcacaactgctataaagagaataagatacttaggaatacaacttacaagaggtttgaaggactttttcaaggagaactacaaaccactgctcaaggaaataaggacacaaacaaatggcaaaacattccatgcttatggataggaagaatcaatattgtgaaaaagaccatactgcccaaagtaatttatagattcagtgctatccccatcaagctaccaatgactttcttcacagaattagaaaaaactactttaaatttcatatggaacctaaaaagagcccatatagccaagacagtcctaagcaaaaagaacaaagctggaggcatcacgctacctgacttcaaactatattacaaggctacagtaaccaaaacagcatggtactggtaccaaaacagatatatagaccaatggaacaaaacagaggcctaataaataacaccacacatctacagccatctgatctttgacagacctgacagaaacaagcaatggggaaaggattccctatttaataaatggtggtgggaaaactggctagccatatgcagaaaactgaaactggacctcttccttacaccttatacaaaaattaattcaagatggattaaagacttaaacataagacctaaaaccataaaaaccctagaagaaaacctaggcagtaccattcaggacataggcatgggcaaagacctcatgactaaaacaccaaaagcaatggcaacaaaagtcaaaatagacaaatgggatctaattaaactaaagagcttctgcacagcaaaagaaactatcatcagatgaacaggcaacctacagaatgggagaaaatttttgcaatctatccatctgacaaagggctaatatctagaatctgtgaggaacttaaacaaatttacaagaaaaaaacaaccccatcaaaaagcgggcaaagg

SEQ ID NO: 1936 - DNA, 131 bp, Homo sapiens
  source 1..131: mol_type = other DNA
tctattcatcccttaatatccccattagaatataagctctttgggggcagggactctgtcttgcttaccattgtagccctactatgcctggtacatagtaggaacttaataaatatttgttaattgactga

SEQ ID NO: 1937 - DNA, 398 bp, Homo sapiens
  source 1..398: mol_type = other DNA
gtagtgtgacaggtccttcaccaggttatgtaagggtgtatgtccactgcttgaaccctgaaggctggggggtaagccaagggcatggtgcccagccaagaagcaggtatccctgagaacccaaatatcccagagaatatctgggaacataccaaggaaaacagtcctatcacacatacacagtaggcaaagagccagaaaattagcttaaaagcagcttagagtcaggaggcaggatgggtctccacagttgttcagctgcttcccaggagtgccttatatggaagttctaataaatgcatctacttgccaacctggacttgtctgagtcattctttggtctctcggctccctctctatttggggggacattgcaatcccagattcttctcataaca

SEQ ID NO: 1938 - DNA, 259 bp, Homo sapiens
  source 1..259: mol_type = other DNA
aatataatataatgcttaacagcatgtggtctgttcagagacccaccttcatgacctggatctgctactcactaactaacctctggtaaattacctaacttctccaattctccgttttatcatctattgaaaaacgataataacagcacagtactgaccttgtaggattcttgtgaggattaaatgagatggcatgtatcaagtgcttagcttggaaactgatgcacagtgaagtatccaataaatgtatgttgttatt

SEQ ID NO: 1939 - DNA, 481 bp, Homo sapiens
  source 1..481: mol_type = other DNA
agtgtggtcttggggccccagcgggcccctaaggtcctttccatgggttcagagggtcaaaactgtgttcataataatgacattatttgcttttcactctcattctctcaagagtgtacagtggggttcttcagaggctacgatgtgatatgtgataacccaaccaattgaatgcagaagctagatatgagaacctagttgtcttctgttaagccagacatgaaacaggtttgcaaaaatatcaaacaatgccacttttctcataattttttttgttttggcaaacagttattttcacaaaaatgtgttattcatatgttaatgtataatgggttatttttaaaatgaagtaatgaacagatatatccaattcctaatacagtaaatattgatagatataacttatataaagaaaaactctttggggtcctcaaatcttaaggtataaaagggtcctaagaccaaaaggtttgagaaccat

SEQ ID NO: 1940 - DNA, 65 bp, Homo sapiens
  source 1..65: mol_type = other DNA
tctagattatggatcttcggataaattctgccattttcatttcacttcctgaaagtcagggttgg

SEQ ID NO: 1941 - DNA, 232 bp, Homo sapiens
  source 1..232: mol_type = other DNA
aaatcctgacagacaaaaagtatattagtagttttcagggactgtgaaagggctgaatggggagtaactgctcttgggtacaaggtttctttttagagtgattaaaatattctgaaatgtattatggtggtggttgcacaactctgtgattctaccgaaaactattgaattgcactttaaatggatgaattgtgtggtatgcaaattatatcccaatgaaaatgctgaaaaa

SEQ ID NO: 1942 - DNA, 294 bp, Homo sapiens
  source 1..294: mol_type = other DNA
atctccattcctactgtcactgatttagtcatcctctcttccctggaccattatacagtaacagccctttaaccagcctggcttctcgcttgggactcattctccatattaccactagagaggtcttccaaacaacaacaacaacaaatccaagcacatcaatcctctgaccaatatcatccagcagctcccaaccgttcccagaatagagttaggaatctctagacaggcttaaaatgccttcattttctgtgctctgactcctcttttcaaccatatccccacctaccaccc

SEQ ID NO: 1943 - DNA, 295 bp, Homo sapiens
  source 1..295: mol_type = other DNA
ccaggcaccgtggctcatgcctgtaatcccaacacttagggaggctgaggtgggtgggccgcttgagctcaggagttcaagaccagcctgggtaatatagtgagatcctgtgtctctataaaaaaattaaaaattagtcagttgtagtgacacatacctgtagtcccagctactcaggaggctgaggtggaaggatcacttgagcccagaaggtaaggctgcagtgagctgtgactgtgccactacactccagcctgagtgacagagaaagaacctgtcaaaaaaaaaaaaaaaa

SEQ ID NO: 1944 - DNA, 59 bp, Homo sapiens
  source 1..59: mol_type = other DNA
ttttttaagattgactagcatcaatgctgggaaacttgctagaggtgacctcaatgact

SEQ ID NO: 1945 - DNA, 867 bp, Homo sapiens
  source 1..867: mol_type = other DNA
agcacacctggtgcccagattttggtttccaataaaaggaaccaggactccttagaaaatgaactgattctagaactgggatatgaactgtacaagatgagcctagagtatcttgtgccacagaaaaatgaagtactgaaattaaaaaaaaaaaatcatagtgattgggagtatgtcagcatgatcgaactgaaggatctctgaaaggccacagctggagcaatttgagtaacaaaataaagtagtattgggttataacccaaactatataataaatatttacaagcccaaactaatataaatgattgaatgggaacaaatctcttgtgcagaagaatttcaaataatttatgtagatactccccacttagtgggctctgcatagtgacttccttgcagagtataatatggaaaggggggaaaagagtaactttacagtggagaaatctgacagacaccagctcagccaggtgattgaggttaacatcatccatgataagcccttttgatagcatgtatccttgatagcatcacatcatacagaatgtgataagaatggcactttacctctgtggtcctcctccccagaactcagaacccaagtctgatcaggagaaaaacatcacacaaattccaattgagaagcattctttaaaatacctaaccagtacttctcaaaactatcaaggccataaaaaacaaggaaaatctgagacatggtcacagccaagaggagcctgagaagacatgactgctagatgtaatgtggtatcctacatggaattatataccacgaaaagaaaaaaaggtcatttggtagaaactagggaaatctgaatacagtgtggacttcagttaatataaatg

SEQ ID NO: 1946 - DNA, 69 bp, Homo sapiens
  source 1..69: mol_type = other DNA
tttaaattgcagaatgccgggtctaagttgtagattttatcaacacaaatttcctgaggtggaagatgt

SEQ ID NO: 1947 - DNA, 152 bp, Homo sapiens
  source 1..152: mol_type = other DNA
ccaggcatggtagctcatgcctgtaaccctggcacttaaggggccaaggcaggaggatcacttgaggccagtgagctgtgatcactccagtgcactcgagcctgggtgacagggcaagaccctgtctcaaaaaaaaaaaaaaaaaccaaaaa

SEQ ID NO: 1948 - DNA, 111 bp, Homo sapiens
  source 1..111: mol_type = other DNA
gggcatggtggctcacactcttacagaggcagaggcaggaggatagcttgagcccaggatttcgagacctgcccaggcaatataacaccatttgccaaaaaaaaaaaaaaa

SEQ ID NO: 1949 - DNA, 81 bp, Homo sapiens
  source 1..81: mol_type = other DNA
gcccaggcatggtggatcaccggaggtcagtagttcaagaccagcctggccaacatggtgaaaccccacctctactaaaaa

SEQ ID NO: 1950 - DNA, 1626 bp, Homo sapiens
  source 1..1626: mol_type = other DNA
ttcaaggtggctaactagagagattggacactcaccctctccagaaagaaccaaaattactaatatataaccaaaataatcacacctataatagaacatctagaagagaacactagtgtccaacaggatctagtcacaggaaacacctgaggcaaagaaggagaaggaagcaagtgaccaactcagccaagatcagctatgagccccaagggactcattatcatagggaagggtaagtgagagaaccttaacaatccatgtccccactgtggactgcagcaatccaaaccatgggagagctcctctacccacacaaaccctgatactagcaagggtggtgatctggagacccacaagggcattgcaccagacaaggaactcatgctgggtcagtcacacccccaaggcctaagctgctactgcagagcactactgtgagagcacagctgtcataggactgcatcctgacctggaaatcagaggccccatatctccacattctgggatctcccactaacaaccccagtgttgactcaaatggctacagcagcatagcactggctggacccaaaggtgctccagggtccccagtattctagcccatggaaaacactactcctcagggaatggtgcagtgtaccaaaaagttacagtgtaccaaaggtgcattctaccggaaaggcagcacaaattctgtgctcaagctcacaagtggaaagatctcctccccttctctgcatattgccatagcagtagctgtcactaggaacccagatgggtaagcataatagctgtctggagctggaagcagtgaccctgcctgcaccaatggagtggtctctgtgctcaggtttacacatatacaacaggagcctctctcctcctctgcacaccactacagccgctgccactgctgctattgccaggggccagggtggacaagccggaggagctgcctgtctggggctgtaagtagtaactgtgcccccactggtggtgtggcctccatgcttagactcatacgtgaacatggggcccctcccctccttggcatagcagtacagtactgttgctgccaagagtggacaagtctaagagctgtgtgtctggggctgtggatagtgaccctgcatcacagccaccatcaacattagcacatactgcttgggacccagagggtcttctcctcactgctgctgccactacccacaccataccaaattcccagggacatgagaacttgctcacctgcccaccccacctctgccaccaccacctcagcatctgagcaagccacctggggagccaagaattgaacctcttggtcccactaaaactagtgccactgcacactgtgctggggcctaagaacaagtatgatcagcccaccgctaccaccaatagggcccaaaaagtggcctgcctagcatccctgtcccaccaaacttcactataagctccactaataaccacaccataaaccatggaggaaatcacagataacacagatattgtttatagctaaagaaataatacagagactacacaactgaatgcacccagaatcaaagccaaagagcccacccaactagcaccattgatacatctcctatgaaagaaaatcca

SEQ ID NO: 1951 - DNA, 296 bp, Homo sapiens
  source 1..296: mol_type = other DNA
ggccggatgtggtggctcacgcctgtaatcccagcactttgggaggccatggcgggtggatcacttgaggtcagaagttcaagaccagcctgaccaatatggtgaaaccccgtctctactaaaaatacaaaaattagccgggcgtggtggcgggcgcccatagtcccagctactcgggaggctgagacaggagacttgcttgaacccgggaggtggaggttgccctgagctgattatcatgctgttgcactccagcttgggcgacagagcgagactttgtctcaaaaaagaagaaa

SEQ ID NO: 1952 - DNA, 594 bp, Homo sapiens
  source 1..594: mol_type = other DNA
gttctttgccatattttgacatggccctgcaatgccatcttttgtgtgtggggggaagccggggttgggggggttgggaggggggtgggaatgtgcatctataaagaatctctgttaactagatctttccccttccaggccctccctatcctgaagacattagctgagagtctggcaccttttaaaggtctgatcatcaattgtctctctgggcggccacctatgagacttcatctgtgtggtaagaacttttgtctccatagctccttatcttaactcagacactcctttctgtttattccagttctttagatagtaactccttcaaccaattgccaatcagactttgaatccacctgagacccacttcccccaaccccctcaagttgtcccacctttccagatcgaaccaatgtatacctcacatatactgactgatgtctcgtgtctccctaaaactaagctgaaacccaaccaccttgggcacgtattctcaggaccttttgagactgtgcctcaggccatggtcactcatgtttggttcagagtaaatcttttcaagtattttacagagtttggcgttcttcatcaata

SEQ ID NO: 1953 - DNA, 80 bp, Homo sapiens
  source 1..80: mol_type = other DNA
actgaatgtgaaattgcatgttcagatgtttactacgaggcctggctcacaggaagtgttcagtaaaagtatgcactgtt

SEQ ID NO: 1954 - DNA, 1049 bp, Homo sapiens
  source 1..1049: mol_type = other DNA
tagaatttggcgtcttgatagttgagaaaatggcgatgacactgttggaagactggtgccgggggatggatgtgaactcccagagagctctgttagtctggggcatcccagtgaactgtgatgaggctgaaatcgaagagaccctccaggctgcgatgccccaggtctcctaccgaatgcttgggagaatgttctggagggaagaaaatgcgaaagcagccttattagagctcactggcgctgtagattacgccgcgatccccagggagatgccgggcaaaggaggggtctggaaagtgttatttaagcccccaacttctgatgctgaatttttagaaagattgcacctcttcctagctagagaggggtggaccgtgcaagatgttgcccgtgtccttgggtttcagaaccctactccgaccccgggcccagagatgccagcagagatgctaaactatattttggataatgttattcagcctcttgttgagtccatatggtacaagaggctgacacttttctcggggagggacatcccagggcctggagaggaaacctttgatccctggctggagcacactaatgaggtcctagaggagtggcaggtgtccgatgtagaaaagaggcggcggttgatggagagtcttagaggccccgccgctgatgttattcgcatccttaagtccaacaaccccgcgataaccactgccgaatgcctgaaggcgcttgagcaggtgtttgggagcgttgagagctctagggatgcccagatcaaatttctgaacacttatcagaacccgggagaaaaattgtctgcttatgtcattcgtctggagcctctgctacagaaggtggtagagaagggggccattgataaagataatgtgaaccaggcccgcctagagcaggtcattgccggggccaaccacagcggggccatccgaaggcagctgtggcttaccggggctggggaagggccagccccaaacctctttcagttgctggtgcagatccgtgaggaggaagccaaggaggaggaggaggaggct

SEQ ID NO: 1955 - DNA, 316 bp, Homo sapiens
  source 1..316: mol_type = other DNA
gccaggcacggtggttcacgcctgtaatgccagcactttgggaggccgaggcgggtggaccacctgaggtcaggagttcaagaccagcctggccgacatggcgaaaccctgtctctactaaaaaaaaaaatacaaaaagattagctgggtgtggtggtgtgtgcctataatcccagctactcaggaggctgaggcaggagaattcttttaacccaagaggcggaggttgcagtgagccaagatcacaccactgcactccagcctgggcgacagaatgagactctgtctcaaaaaaaaaaaaaaaaaaaaaaaaaaa

SEQ ID NO: 1956 - DNA, 309 bp, Homo sapiens
  source 1..309: mol_type = other DNA
gccaggtgcggtggttcacgcctgtaatcccagcactttgggaggccgaggtgggcggatcattaggtcaggagattgagaccatcctggctaacatggtgaaaccctgtctctactaaaagtacaaaaaattatccgggtgtgggggcatgcacctgtaatcccagctactcgggagactgaggcaggagaattacttgaacccaggaggtggaggttgcagtgagccgagatcgtgccactgcactccaccctgggcaacagagcgagactccatctcaaaacaaaacaaaacaacaacaaaaaaaa

SEQ ID NO: 1957 - DNA, 138 bp, Homo sapiens
  source 1..138: mol_type = other DNA
gccaggcgcggtggctcacgcctgtaattccatcattttgggaggccacagtgggcagattgcttgagcccaggagttgaagaacgtggcgaaaccccgtatctattatttaaaaaaattgaaaaagtaaaaaaagaa

SEQ ID NO: 1958 - DNA, 307 bp, Homo sapiens
  source 1..307: mol_type = other DNA
gccgggcatggtggctcacgcctgtaatcccagcactttgggaggccgaggcaggtggatcataggtcaaaagatcgagaccatcctggccaatatggtgaaaccctgtctctactaaaatacaaaaattagctgggcatgatggtgcatgcctatagtcccagctacttgggggcctgaggcacgagaatcgcttgaattcgggaggtggaggttgcagtgagccgaaattatgccactgcactccagcctgggcaacagagtgagactctgtctcagaaaaaaaaaaaaaaaaaaaaaaaaaaaa

SEQ ID NO: 1959 - DNA, 131 bp, Homo sapiens
  source 1..131: mol_type = other DNA
ccgggcgcagtggctcacgcctgtaatcccagcactttgggaggctgaggcgggtggatcacctgaggtgaggagttcaaaaccagcctggccaacacggtgaaaccctgtctccactaaaaatacaaaaa

SEQ ID NO: 1960 - DNA, 519 bp, Homo sapiens
  source 1..519: mol_type = other DNA
aaaaacaaacaaacaaccacaatgaaatattacctcatacccactaggatggctaacataaaagacagtaaccattgttggcaaggatgtggacaaactggaattctcacacattgccagtgagaacataatatggtatagctactttggaaaagtttggcagttcctcaaaaagctaaacataaagttaccatatgacccagcaatctactcctaggtatgtatatactcaatggaactgaaaacattgtctacataaaaatatgtgcatatgtgttcacagcactactattcataatggccaaaaatcagaaacccaaatttccatcaattgatgaatggataaatgaaatgtggtatatccatacaatggaatattattcagccataaaaaggaataggatactaatacatgctacagtgtagataaaccttgaaaacaatatgttaagtgaaaggagccagtcacaaaaaaaggccacatttgtatgattccatttatattaaatatcaagaata

SEQ ID NO: 1961 - DNA, 309 bp, Homo sapiens
  source 1..309: mol_type = other DNA
gccgggcacagtggctcacacctgtaatcccaacactttgggaggccaaggtgggcggatcacctgaggttgggagttcaagaccagcctgaccaacatggaaaaaccctgtctctactaaaaatacaaaattagcggggcatggtggcacatgcctgtaatctcagctacttgggaagctgaagtaggagaaacgcttgaacccgggaggcggacgttgcggtgagctgagatcgtgccattgcactccagcctgggcaaaaagaatgaaactctgtctcaaaaaaaaaaaaaaaaaaaaaaagaaaa

SEQ ID NO: 1962 - DNA, 302 bp, Homo sapiens
  source 1..302: mol_type = other DNA
gctgggtgtggtggctcacgcgtgtaatcccagcactttgggaggctgaggcaggcagatcacttgaggtcaggagttcgagaccaacctggccaatatggtgaaactctgcttctactgaaaatacaaaaattagccaggcatggtggtgtgcacctatattcccagctactcaggaggctgaggcaggagaattgcttgaacccaggaggtgaaggttgcagcgagctgagatagtgccattgcactccagcctgggcgttgcagcaagactccgtccccccccccccaaaaaaaaaaaa

SEQ ID NO: 1963 - DNA, 1005 bp, Homo sapiens
  source 1..1005: mol_type = other DNA
accacatatctaacagaggaattttatctaggatatataaaaaacctctcaaaactcaatagtaaaaagaacaaatgacctaaatagaaaatagacaaaagacatgaagacatttcaccgaagaggatacatagatggcaaattagcacacaaaaagatactcaacatcattagccattggaaatgcaaattaaaaccacatgtggtatcattacacacatctatgtgaatggttaagataaaaaatagtagtaataccaaatgctggtgaggatgtgaagaaactggatcaatcatacattgctgtctgaattgtatgagtggctgtatgtaaaaagtagagccactctggaaaaagagtagggtagtttcttacaaaaatatatgtgtttaccatacaacccaacagttgcccttttgagcatttatcccagaaaatgaaaatgtatgttcacataaaaacctgtacatgaatgttcacagcagctttattagggcaaaaaactgaaaacaactcttatgtcctttagtgggtgaatggttaagcaaactgtggtacatccataccatggaatactactcagcaatcaaaaggaactgcccccacttcaccacgatgcaatatatgcatgtaagaaatctgtacttataccccctaaatatataaaacatttttaaaagaaaaaaaggaagaaactattcatacatgcaacaacttggatggatttcaagggaattatgctgaatgaaaaaagatcagcctcgtaagattacattctgtatgattccattcatacaacattcttgaaatgacaaaattacagagatggaggacagaacagtggtagccacaggttggggtgagggtataagaaagggatgtggctgcggctgtaaaagggcagtgcaagggatccatgtgacagaactgttctgtctcttgtgatggtggtcacatgaatctacacatgtgataatattgcatagaattaaatacacatacac

SEQ ID NO: 1964 - DNA, 183 bp, Homo sapiens
  source 1..183: mol_type = other DNA
tggaaaagggagcctggaagaggttgcaggtaggggaaggagacacagtgggcttccgagaagctggcaatttcttgacttggatggagttacgtagtattcactttaaaattattctttaaattgtacgtacatgttatatacttttcagtatgcatatctttaaattttaaaaattaaaaa

SEQ ID NO: 1965 - DNA, 294 bp, Homo sapiens
  source 1..294: mol_type = other DNA
gctgagcgtggtggctcaggcctgtaagcccagcactttgggaggctgaggcaggcggatcaactgaggtcaggagttcgagaccagcctggccaacacggtaaaaccccatttctactaaaaatacaaaaattagctgggcatggtggcaggcacctgtaatcccagctacttgggaggctgtggcaggagaatcacttgaacccaggaggcggaggttgcagtgagccgagatcccaccattgtactccgcctgggcaacaagagcgaaactccatctcaaaaaaaaaaaaa

SEQ ID NO: 1966 - DNA, 387 bp, Homo sapiens
  source 1..387: mol_type = other DNA
agtaagtgaaaaggaataggctactaatacacacaataacatggatgaatctcaaaacaatatgctgagtgaaagaagccaggcaaaaacaagtacatacagtatgattccatttatctaaaactccaggaaatgcaaactaacctatagttacagaaagtagataggtggttgcctctggggaaggaggtagggacagagaggagatgggagggacaagaggaataggcaaggggcaagcagaaacttttggggatgatagacatgttcactatcttgcttgtgatgatgatttcacaggtgcatatttgtgtcaaaatttaatcaaatcgtatgctttaaatatgtatagctaataaatgtcaattatctcaataaagctgcctt

SEQ ID NO: 1967 - DNA, 61 bp, Homo sapiens
  source 1..61: mol_type = other DNA
attgcggatcttcagataaattctgccactttcatttcacttcctgaaagtcagggtcggc

SEQ ID NO: 1968 - DNA, 83 bp, Homo sapiens
  source 1..83: mol_type = other DNA
gcttgtccaacccttggcccatgatggttttgaatgtggcccaagacaaattcgtaaactttcttaaaacattatgctatttt

SEQ ID NO: 1969 - DNA, 310 bp, Homo sapiens
  source 1..310: mol_type = other DNA
gccaggcgcggcggctcatgcctgttatcctagcactctgggaggctaaggcgggtggatcacctgagctcagaagttcaagaccagctggccaacataatgaaatcccatctctactaaaaatacaaaaattagtcaggcgtggtggcacatgcctgtagtcccagctactcgggaggttgaggcaggagaatcacttgaacccgggaggcggaggttgcagtgagccgatgtcgtgccactgcactctagcctgggtgacagactgagactccgtctcaaaaaaaaaaaaaaaaaaaaaaacaaaaaa

SEQ ID NO: 1970 - DNA, 239 bp, Homo sapiens
  source 1..239: mol_type = other DNA
gatgtgagggcgatctggctgcgacatctgtcaccccattgatcgccagggttgatttggctgatctggctggctaggcgggtgtccccttcctccctcaccgctccatgtgcgtccctcccgaagctgcgcgctcggtcgaagaggacgaccatccccgacagaggaggaccagtcttcggtcaagggtatacgagtagctgcgctccactgctagaacctccaaacaagctctcaag

SEQ ID NO: 1971 - DNA, 320 bp, Homo sapiens
  source 1..320: mol_type = other DNA
gctgggcgtggtggctcatgcttgtaatcccagcactttgggaggcccaggcgggtggatcacctgaggtcaggagttcgagactagcctggccaatgtggtgaaacccaatctctactaaaaatacaataattagccaggcatggtggcaggtgcctgtaatcccagctacttgggaggctgaggcagaagaattgcttgaacccgggaggcagaggttgcagtgagccaagatcgggccactgcactccagcctgggcgaaaagagcaaaactcaatctcgtaaacaaacaaacaaacaaacaaacaaacaaacaaac

SEQ ID NO: 1972 - DNA, 309 bp, Homo sapiens
  source 1..309: mol_type = other DNA
gccaggcgcggtggctcacgcctgtaatcccagcactttgggacgccgaggcgggtggaccacgaggtcaggagatcgagaccatcctggctgacacggtgaaaccccgtctctactaaaaaacaaaaaattagctgggcatggtggcgggcgcctgtagtcccagctacttgggaggctgaggcaggagaatggcgtgaacccgggaggcggagcttgcggtgagccgagatcgcgccactgcactccggcctgggcgacagagcgagactccgtctcaaaaaaaaaaaaaaaaaaaaaaaacaaaaa

SEQ ID NO: 1973 - DNA, 403 bp, Homo sapiens
  source 1..403: mol_type = other DNA
agtcatcctcccccatccatggtttctgttactcatggtttcagttactcatagccaactgcagaccgaaaatactaaatgaaaaatttcagaaataaacaactcttaagttttaaattgtgtactcttcggaatatcgtgatgaaatctcacaccatcctgctccatcctacctaggacgtgaatcctccctttgtccagggtacccgtgctgtctacaccacccgcctgccagtcacccagcaggtgatcagatcgactgtcatggtattgcagtgcttatattcaagaacctcttatgtgactcagtaatgtcctcaaagtgcaagagcagagatgctggcaatttggatatgccaaaaagaggccataaagggcttcctttaagtgaaaaggtgaaagt

SEQ ID NO: 1974 - DNA, 296 bp, Homo sapiens
  source 1..296: mol_type = other DNA
gctgggcgcagtgtctcacgcctgtaatcccagcactttcagaggccgaagcaggtggatcacttgaggtcaggagttcgaaactagcctggccaacatggtgaaaccccgtctctactgataatgcaaaacttagctgggcgtggtggcacatgcctgtagtcccagctactcgggcaactgaggcaggagaatagcttaaacctggaaggcggaggatgcagtgagccaagatcacgccactgcactccagcctgggtgacagagcgagactctgtctcaacaacaacaacaaa

SEQ ID NO: 1975 - DNA, 1048 bp, Homo sapiens
  source 1..1048: mol_type = other DNA
atatttagaacttaagtctattatttcgggcaccatgactttgaggcttttagaagactggtgcagggggatggacatgaaccctcggaaagcgctattgattgccggcatctcccagagctgcagtgtggcagaaatcgaggaggctctgcaggctggtttagctcccttgggggagtacagactgcttggaaggatgttcaggagggatgagaacaggaaagtagccttagtagggcttactgcggagactagtcacgccctggtccctaaggagataccgggaaaagggggtatctggagagtgatctttaagccccctgacccagataatacatttttaagcagattaaatgaatttttagcgggagagggcatgacagtgggtgagttgagcagagctcttggacatgaaaatggctccttagacccagagcagggcatgatcccggaaatgtgggcccctatgttggcacaggcattagaggctcttcagcctgccctgcaatgcttgaagtataaaaagctgagagtgttctcgggcagggagtctccagaaccaggagaagaagaatttggacgctggatgtttcatactactcagatgataaaggcgtggcaggtgccagatgtagagaagagaaggcgattgctagagagccttcgaggcccagcacttgatgttattcgtgtcctcaagataaacaatcctttaattactgtcgatgaatgtctgcaggctcttgaggaggtatttggggttacagataatcctagggagttgcaggtcaaatatctaaccacttaccagaaggatgaggaaaagttgtcggcttatgtactaaggctggagcctttgttacagaagctggtacagagaggagcaattgagagagatgctgtgaatcaggcccgcctagaccaagtcattgctggggcagtccacaaaacaattcgcagagagcttaatctgccagaggatggcccagcccctggtttcttgcagttattggtactaataaaggattatgaggcagctgaggaggag

SEQ ID NO: 1976 - DNA, 298 bp, Homo sapiens
  source 1..298: mol_type = other DNA
ggctgggtacggtggctcacgcccgtaatcccagcactttgggaggccaaggcggacggatgacaaggtcagaaatcgagaccatcatggccaacatggtgaaaccccgtctcttctaaaaatacaaaaattagctgggtgtggtggcgtgcccctgtaatcccagctactcgggaggctgaggcaggagaatcacttgaacctgggaggcggagattgcagtaagcccaggtcgcaccactgcactccagcctggagacagagtgagactccgtctcaaaagaaaaaaaaaaaaaaa

SEQ ID NO: 1977 - DNA, 356 bp, Homo sapiens
  source 1..356: mol_type = other DNA
aggacacatttccttactccatagcagctgtggtcagtggcttagctcggacaaggagatgagagcccatgtgttgtgagggttcttctgggaactctgagaaggcaggagccgcccccgcccttcactgcctctcttccattctgcagcatggaatatggatgtgtggtctggatgtacagacaccattttggaccataaagacaaggacgattgtctaaggatgacacagccagagcactgagagtggcgagaaggacaggggagctgctgtgccaagcaggactgtctctcttaagagaaaaataaaatttattggtgtttaaaccattgcttttttgggctgtcacgtcact

SEQ ID NO: 1978 - DNA, 62 bp, Homo sapiens
  source 1..62: mol_type = other DNA
tcagttttattcactgctgtatcctcagtgcctaggacgatgcttggaacgtggtaagtgct

SEQ ID NO: 1979 - DNA, 60 bp, Homo sapiens
  source 1..60: mol_type = other DNA
cgctggcactgcgcctagcacccagcggctgctcaggaaacgtttgtcgaacgaacgaat

SEQ ID NO: 1980 - DNA, 168 bp, Homo sapiens
  source 1..168: mol_type = other DNA
gccgggggcggtggctcacgcctgtaatcccagcactttaagaggccgaggcaggaggatcccttgaagccaggagttcgagaccagcctgggcaaaaaagtgagacatcgaccccccgcccccgccgccaattccgtctctacaaaaaggaagaaaaaaaaaaaaaa

SEQ ID NO: 1981 - DNA, 153 bp, Homo sapiens
  source 1..153: mol_type = other DNA
gggcagagagctcagtgagctgagagtgaggacacatctttctgttccgactcctccacaaacctgcctggtgaccacaggcaaatcacccccctttctgacccatccgttgaataattcagtggatgtgaatcttgttcatctttaaaattc

SEQ ID NO: 1982 - DNA, 218 bp, Homo sapiens
  source 1..218: mol_type = other DNA
cagaaggcagtacagtgtggcagaaggcagtacagtctggctctagagcccaacttcccagattcaaatcctagctcatcactttcatgctgtgtgacctcaggaaggcaacttcactcctctgagcctctggttcctcatctgtgcactggggcgatgatgctgtgtggtgattgtaaggagttagtgtgcatgcaagtctagtggcacctggacac

SEQ ID NO: 1983 - DNA, 301 bp, Homo sapiens
  source 1..301: mol_type = other DNA
gctgggtgcagtgactcacacccgtaatcccggcactttgggaggccgaggcgggcagggacaggagttcaagaccagcctggccaacatggtgaaaccctgtctctacaaaaaatacaaaaattaaccagacattgtggcatgtgcctgtaatcccagctactcaggaggctgacacaggagaattgcttgaaccaggaggcggaggctgcagtgagctgagattgtgccactgcactccagcctgggcaacagaacgagactctgtctcaaaaaaaaaaaaaaagaaaagaaaaaaaaa

SEQ ID NO: 1984 - DNA, 204 bp, Homo sapiens
  source 1..204: mol_type = other DNA
agtcgttctcaaggaagggctgggggccatcagcaatgtctggagacatttttgattctcacagcttggtggggactgctattggtatctcatgggtggaggccagggatgccaccgaacatcctacaatgcacagggcagccccccacaaataagaattatccagccccaaaatgccaatagtgccgaggtcaggggaccctg

SEQ ID NO: 1985 - DNA, 301 bp, Homo sapiens
  source 1..301: mol_type = other DNA
gcagggtacagtggctcacacctgtaatcccagcactttgggatgccagggcgggcggatcacctgaggtcaggagttcaagaccagcctggccaacatggtgaaaccccatctctactaaaaatacgaaaattagccgggcgtggtggcgcgtgcctgtaatcccagctactcaggaggctgaggcaggagaatcgtttgaacccaagaggtggaggttgcagtgagccgagatcacaccactgcactccagcctgggtgacagagcaagactctgtctcaagaaaaaaaaaagaaaaaa

SEQ ID NO: 1986 - DNA, 299 bp, Homo sapiens
  source 1..299: mol_type = other DNA
gccgggcgtggtggctcatgcctgtaatcccagcactttgggaagccatggcgggtggatcaggaggtcaggatatcgacaccatcctggctaacacggtgaaacctcgtctctactaaaaatacaaaaaattagctgagcatgatggcaggcgcctgtattcccagctactcgggaggctgaggcaggagaatggtgtgaacctgggaggcagagcttgcagtgtgctgagatcatgccactgcactccagcctgggtgacagagcgagactccatctcaaaaaaaaaaaaaaagaaa

SEQ ID NO: 1987 - DNA, 309 bp, Homo sapiens
  source 1..309: mol_type = other DNA
ccgggcgcggtggctcacgcctgtaatcccagcacttcgggaggccgaggcgggtggatcacaaggtcaggagatcgagaccatcctggctaacacagtgaaaccccgtctctactaaaaatacaaaaaattagctgggcgtcgtggcggaggcctgtagtcccagctactcgggaggctgagccaggagaagggtgtgaacccgggaggcagagcttgcagtgagcggagatcacacaactgcactcgagcctgggcgacagagcgagactccgtctcaaaaaaaaaaaaaaaaagaaacaacaacaa

SEQ ID NO: 1988 - DNA, 304 bp, Homo sapiens
  source 1..304: mol_type = other DNA
tgggcacggtggctcacatctgtaatcctagcactttgggaggctgaggtgggaggatcacttgagctcaggtgtttgagacaaacctgggcaacatggcgaaacccacctctaccaaaaatacaaaaattagccagatgtgatggcacatgcctgtggtcccagctacttgggagacttgagttgagaggattgcttgagcctggaaggtggaggttacaatgagccaagatcatactactgcactccagcctgagtgacaaagtgagaccctatctcaaaaaaaaaaaaaaaaaaaaaagaa

SEQ ID NO: 1989 - DNA, 300 bp, Homo sapiens
  source 1..300: mol_type = other DNA
gccgggcgtggtggctcatgcctgtaatcccagcactttgggaagccatggcgggtggatcaggaggtcaggatatcgacaccatcctggctaacacggtgaaacctcgtctctactaaaaatacaaaaaattagctgagcatgatggcaggcgcctgtattcccagctactcgggaggctgaggcaggagaatggtgtgaacctgggaggcagagcttgcagtgtgctgagatcatgccactgcactccagcctgggtgacagagcgagactccatctcaaaaaaaaaaaaaaaagaaa

SEQ ID NO: 1990 - DNA, 105 bp, Homo sapiens
  source 1..105: mol_type = other DNA
ggacagttgcttttttttcttttttcttcagctgtgtgcagttgattaacttgtacagagcctatcacacaatagatgtttaagaaatattaagtgaatgaatga

SEQ ID NO: 1991 - DNA, 268 bp, Homo sapiens
  source 1..268: mol_type = other DNA
cctggcacagtggctcacacctacaataccagctgaggcaagaggatggcatgaggccaggagttcaagaccagtctaagcaacatagtgagatcccaactctaaaaaaattagaaaactaaaattagccaggcatgttgacacgcgactgtagtcccagctactctggaggataaggtgaaaggatcgtttgagctcaggtgttcaaggctgcagtgagttatgttaatgccactgaactccagcctggactgtgagatactgtctc

SEQ ID NO: 1992 - DNA, 293 bp, Homo sapiens
  source 1..293: mol_type = other DNA
tgcctgtaatcccggcactttgggaggttgaggcgggtggatcacctgaggtcaggagttcgagcccagcctggccaacatggcgaaaccctacctctactaaaaatacaaaaattagcctggcgtggtggcaggcacctgtaatcccaactacgcaggaggctaaggcaggagaattgcttgaacccgggaggcggaggttgcagtgagccgagatcgcgccaatggcactccattcagcttgagtgacagaggtgagactcccatctcaaggtaaaaaaaaaaaatagaaa

SEQ ID NO: 1993 - DNA, 295 bp, Homo sapiens
  source 1..295: mol_type = other DNA
accaggtatggtggctcaagcctgtaatcccagcactttgggaggctgagttgggtggatcacctgacatcaggagtttgagactagcctggccaacatagcaataccctgtctcaaagatacaaaaattacccaagcttggtggtgtgtgtctgtaatcccagctactcaggaggctgaggcaggagaatcacttgaacctgggcggcaaaggttgcagtgagccgagaccatgccactgcactccagcctgggtgacagagtgagactccgtctggaaaaaaaaagaaaaaaa

SEQ ID NO: 1994 - DNA, 729 bp, Homo sapiens
  source 1..729: mol_type = other DNA
gcctgacctaagatgttctcttcattcctgtggtccagagtctcctccccttacatagagatacacggcatctcagagtacagaaaaaccttcgccatctcaggaagtaccagtcagcaccagttggaggcccagcaacatcagataaactaagtgatcaaaacagcatcccctcagctctgatagcaagactgcctgcgaaaacatggcctacaaaagtaggacaggacattcaaattaaacctaaacagggcacatgcctgctaaaataaaacatttgaatagattcagattcctctaacttaaaaaggaaaaaaaaatgcaggataaactaaaacatcacccatctatcaagaaccggaaaaatcacaattagaaggaaaatcataagcaggatgagaaaagacagttaaccaagccaacctcaagattaaccaaatgttgtggttatctgaagaagttaaaaacagtcatggtaaaaatgctttagcaagtaattataaagcttcttgaaaaaagtaaaaaagtagaagtctcagaaaggtagtagaagtttttttaaaaaaagaaccaagtgaaaaaaacagaactaaaaaattcaaaaataatagagtagtgattaagtgaatttagcatagaacaatccaatttagctaatctggacaagaaagaaaatactctgaaaaaaaaaaaaaaaaaaaaaaaaagaacacagcttcatggacctgt

SEQ ID NO: 1995 - DNA, 297 bp, Homo sapiens
  source 1..297: mol_type = other DNA
ggccgggcacggcggctcatgcctgtaatcccaacactttgagaggctgcagtggctggatcacctgaggttgggagttcgagaccagcttggccaatatggtgaaactccatctctactacaaacacaaaaattagccaggggtggtggcgggcgcctgtaatcccagctactcaggatgctggggcgggagaatctcttgaacccaggaggtggaggttgcagtgagccgagattatgccactgcactccagcctgggcaacagaatgagactccatctcaaaaaaaaaagtaaa

SEQ ID NO: 1996 - DNA, 499 bp, Homo sapiens
  source 1..499: mol_type = other DNA
gtagtgaattcttataattttatgttgcctcggcatccatcttgagtataagtttaactttgttataccagaagcaaggcttactcacttttgcacagtttccagttctacacctccttctcgttcctcagtgtgattggtccagatagctgccttatccaactgcctcctttggaccacttcatcatgggacagcttgatgcaatctacttgacaagaccctggaaccccacacccctcatggaaccagtgtccacctcccagtcacagtgtgaccccagggaactcttgcctgcttgctttaaacccaccacttaaaagtctccacagaaaacctgtttgaatagtacccttgacccaataagggcattggcccctgggtgtctctctctctctctctctctctctctccctctctctccctctctctctctcgctccctgacctctgcgtgtggactccaggcatgccatatacccctcaggacctgtaagtaata

SEQ ID NO: 1997 - DNA, 409 bp, Homo sapiens
  source 1..409: mol_type = other DNA
taaatgagctcttcgaaatcaggaagagactaaatcctcctcccacccacaaaattggacataaagaagaaattaaaaaatacagatggctaataaacatgaaaaaatgaccaaactcaaaaacaaaagagatacaatttaagacaatagtttgggtgatcacattggcaaaaatgttaaatatttataaaatccattgtctgtgaggctgtaggaaagctggcaatctcattcattgccatttgaagataaagttgttaaccacatttttgaaggcaatcttgcaataattttcaaaatataaatataaagtgtgcacatacttaatcccagtaattcaactgataagtaatttattatgatattatagacaaatgcaaaattactgatatatagggaggttcattgc

SEQ ID NO: 1998 - DNA, 1248 bp, Homo sapiens
  source 1..1248: mol_type = other DNA
attcattctgtcaggagtatgactctcatccccaaactggacagatatataatatgaaaactacagaccaatattccttatgaatatagatgcaaacattctaaacaaaatactagcaaaccaaatccagcagcatagaacaaggtttatgtagcatggacaactgagattatcccaggaatgcaaagttaattcaatatacaaaagtccattaatacaacatattaataaaggacaaaacaacatgaaaatcttgatacagaagaagcatttaacaaaacccacagcccctcctttttttttttttgattaaaaaacactcagtaaactaggtttaataaaagaatttcctcaacttgaagcaaacccacagctagctaacatcatactcaatggtgaaagactgaatgctttccccttaaaatcaggaacaagaaaaagatgtctgctcttgtcacttctatccaatattgtactggaggtgctagccagcacactaaggcaagaaaatgaaataataggaatctagactggaaaggaagaagtaaaagtatttctgttcacagatgcatgatctcatatgcaaaaaatactaagtgacaaaaaaagaattttagaaaagctacaatatacaaaatcaatatacaaaaattaattttatttctaacaccagtgatgaatacaaaaataaaaattagaaaataatcatataattaaagtggcatcagtaaaatacttagaaaaaaattaaagacgtcaagacttgcacactgaaatctctaaaacatcactgaaataaagacctaagcaaatgcaaagacatcccacagtcatggaacagaaaacctaacaccattaaaatagcagttatttctcaaatttatctaccaattcaactaaatccctatcaagatcccagctgttttgcaggaattgacacaatgatcatataaaaattcatatgcaatgcaagggacccaaaacagacaaaatgattttggggaaaaaaaaaaaaaaaatggaggacttgcacatcccaaatctaaacttactaccaagctacagccatcaagacagtgcggtgctggtataacgacagacatatagggcaatggagtaagactgagaatccagaaagtcttatatttatggtcaactgttctttgacaagggtaccaggaccattcatggggaaataatagtcttttcaacaactggtgcttgggcagatggatatacagataccaa

SEQ ID NO: 1999 - DNA, 299 bp, Homo sapiens
  source 1..299: mol_type = other DNA
ggccgggcgtggtggctcatgcctgtaatcccagcactttgggaagccatggcgggtggatcaggaggtcaggatatcgacaccatcctggctaacacggtgaaacctcgtctctactaaaaatacaaaaaattagctgagcatgatggcaggcgcctgtattcccagctactcgggaggctgaggcaggagaatggtgtgaacctgggaggcagagcttgcagtgtgctgagatcatgccactgcactccagcctgggtgacagagcgagactccatctcaaaaaaaaaaaaaaagaa

SEQ ID NO: 2000 - DNA, 309 bp, Homo sapiens
  source 1..309: mol_type = other DNA
ctgggcacggtggctcacatctgtaatcctagcactttgggaggctgaggtgggaggatcacttgagctcaggtgtttgagacaaacctgggcaacatggcgaaacccacctctaccaaaaatacaaaaattagccagatgtgatggcacatgcctgtggtcccagctacttgggagacttgagttgagaggattgcttgagcctggaaggtggaggttacaatgagccaagatcataccactgcactccagcctgagtgacaaagtaagaccctatctcaaaaaaaaaaaaaaaaaaaaaaaaaaaaa

SEQ ID NO: 2001 - DNA, 65 bp, Homo sapiens
  source 1..65: mol_type = other DNA
ctagattgtggatcttcagataaattctgccattttcgtttcacttcctgaaagtcagggttggc

SEQ ID NO: 2002 - DNA, 617 bp, Homo sapiens
  source 1..617: mol_type = other DNA
atatcaagtgctgatgaggatacgcaacaacgggagctcttatacactgccagtggtggtgttagatggtacagagaatttgaccatttctttaaaacttaaataattaccatgggacccacagcaagtcttttcctaagtatttacccaaaagaaataaaaagttatgttcatacaaaaacctgtacactagaggtttgttcataatcaatggaaactgcaaaacacaaatataccacaactggagaacgaacacacaattatacattcatacaatgaaatgctactatgcaataagagaaactactgatagagtaacatcatggagaaatcccaaatgcattaggctaagtgtaagaagtcagcctcaaaaggctacatgttgtatgagtccatttacatgacattctagaaaaggcaagaatgtacaaaaagaaaccatatcattggttaagtggacgtgaggggaccgggatgattaaaaataggtgttaagagaaagtttttgtattgaagttgtcttgtattttaattgtggtggttacatgactgtatatgcttgtcaaaactcagaactgtaagggtcaatttcactgtatgtaaattataccaataaa

SEQ ID NO: 2003 - DNA, 2691 bp, Homo sapiens
  source 1..2691: mol_type = other DNA
cagtaacaatttttgaaactgaggcaataataaatagcctaccaaccaaaaaaaaaaaaaaaaaaaaaaagcccaggacaagatggattcacagctgaattctgccagatgtacaaagaagagatggtaccattcctactgaaactattctgaaaaatggaaaaggagggactcttccctaactcattctatgaggccagcatcatcttgatatcaaaacctggcagagatacaataaaaaaggaaaatttcaggccaatatccttgatgaacatcaatgtaaaaatcctcaacagtatactggcaaaccaaatctagcagcacatcaaaaatcaggtaggcatcatctccagaatacaaggttggtttaacaatgcaaatcaataaatgtgattcatcacataaacagcactaaagacaaaaaccacatgattatctcaatagatgcagaaaaggctttcagtaaaattcaacatcctttcatgttaaaagctctcaataaactaggtattgaaggaacatacctcaaaataataagagccacatatgacaaacccacagccaacatcatactgaagggcaaaagctcaagcatatcccttggaaaccagcacaagacatggatgccctctctcaccactcctattcagcgtagtattggaagttctggccgggacaatcaggcaagagaaagaaataaagggcattcacataggaagaaaggaagttaaactatccctgtttgcagacaacatgttcctatatctagaaaaccccataatctcagcctaaaagcttcttaagctgataagcagcttcagtaaagtctcaggatacaaaaatcaatgtgcaaaaattgctaatattcttctacactaacaacagtctagccaagagccaaatcaattcacaattgccacaagaagaataaaatacctaggaatatagctaacaagggaagtgaaagatctctgcaaggaaaactacaaccactgctcaagtaaatcagagatgtcacaaacaaatggaaaaacattccatgctcatggataggaagaatcaatgttgttaaaatggccatactgcccaaagcaatttatagattaaatgctagcctcattaaactaccattgacattcttcacggaactagacaaaactattttaaaattcatatggagccaaaaaagagcctgaatagccaaggcaatcctaagcaaaaggaacaaagctgaaggcatcatgctactcaacttcaaactatactaaaaggctacagtaaccgaaacaacatgatactggtacaagaacagacacatagaccgatggaacagaatagagaacgcagaaataagaccacacacctacaactattggatcttccacaaacctgacaaaaataagcaatggggaagggattccctattcaataaatgatgctgggataactagctagtcatatgcagaaaattgaacctggactccttccttacaccttatacaaaaattaactcaagatggattaaatacttaaatgtaaaacccaaaaactataaaaacccagaagataacctaggcaatacgattcaggaaataggcataggcaaaaatttcataatgaagatgccaaaagcaattgcaacaaaagcaaaaattgacaaatgggatctaattaaagagcttctgcacagcaaaagaaaactatcaacagagtaaacagacaacctacagaatgggagaaaatttttgcaaactatgcttctgacaaaggtctaatatccagcctctgtaaggaacttaaacaaattgacaagaaaaaaaaaaaaccccattaaacagtgggcaaagcacatgaacagacgcttctccaaaagaagacatacatgcagtcaacaaacatgaaaaaatgctcaacattactgatcattagagaaaaatgcaaatcaaaaccacaatgagataccatctcacaccagtcagaatggttattattaaaaagccaaaaaataacacacgtcagtgaggttgtgaagaaaaaggaacacttttacattgctgttgggagtgtaaattagttcaaccattgtggaagacagtgtggcaattccttagagacctaaagacagaaataccattcaactcagcaatcccattactgggcatatactcaaaggaatataaatcattttattataaagacacatgtatgtgtatgctcattgcagcactattcacaatagcaaagacatagaatcaacctaaatgcccatcagtgatagactggataaagaaaatgcagtacatatacaccatggaatactatgcagccatagaaaagaatgagatcatgttctttgcagggacatggatggagctggaggccattgtccttagcaaactaatacaggaacagaaaatcaaatactgcatgttctcacttataagtggaagctatatgatgagaacacatggacacatagaggggaacagcatacgttggggcctatcagagggtggagggtgggaagaaggaaaaataactaatggatactaggcttaatacctaggtgatgaaatcatctgtacagcatgaaataatctgtacagcaaacccccatgacacatgttacatatgtaccaaacttgcacttcctgcacctgtacacttgagcttaaaataaaagtgaaaaaa

SEQ ID NO: 2004 - DNA, 4137 bp, Homo sapiens
  source 1..4137: mol_type = other DNA
taactgtccccatcctagctttaccttcccctagaactgccttttcatctctttgtcaatgtaaacaaaacagtagccttaggagtactcactcaaaaacacgggggccaccggcagcccatagcctttttgtcaaaaattcttgaccctgtaatctgagggtggcctaaatgtattcaatctgtagcagcaacagccctattaacagaaaaaaaagaaaaaattaacttttagaaggaacttcattgtcagtacacctcaccaagtcaaaactatccttaatcagaaggcagaaaggtggcttattgaatcaataattttaaaatacgaagctatcctgttagagagcgttgatttaacactaaccactgataattcgcttaacccagcaggtttcctgactgagaatccaaatttaaagagacctgagcatgagtgttcagatttaattgtcatactaaagtcagacctgatttaagaaagacccctttcaaatggggcagcacttatttatagatggctcttcctgggtaattgaaggaaaaagacataatgggtactcagtagtcaatggggaactccttgcagaagtagagtcaggaatactactcagtaattggtctgcccaaacatgtaaattgtttgcattaaatcaagcctttaaagcatctgcagagccaagaaaggactatttatattgatttcaaagatgccttctgggtagctcacacctttgaaaaaaaaaaaattggagcaaacaaggtcttcaaaggccaagacctggtccacaagaattaatcactcaagtattagataacctccagttgccagaagaaatagctgttgtccatgtcccaggacatcaaagagatatctcttttgaaagctgggggaacaaccttgcagatcaaatagccaaacaagctgccatttcctctgaaatgcctgtttttcacttaaccccttgccttcttcccccaactgcagttcccatcttctttcccactgaaaaagagaaattaataaaaataggggccaaagaaaattcagaagagaaatgggtgttaccagaccaaagaaaaatgttatccaattcccttatgagagacctctctcatctgcatcaagagactcattggggacctcaagctatgtgtgatgcagtcctttgggtttatggatgtgtagcaatttacactttgacatgacaggttacagatagttgcctagtatttaggatgactaataagcagaccctcagaaaaccacctcttaggggaaggtatctggaattaagactgttccaaagtatccaagttgattacgccaagatgccccaaattggttgtctaaaatatttattagtaatagtagatcaccttactcattgggtagaagctatttcctttcaagtgcaactgctaataatgtagtcaaaacattagttgaaaatattatacccaggtttggattaataggaaacattgattcagataatggaactcatttcattgcacatgtcattaagaaattagcccaggtactggatataacatgggaaatcatactccctggcacccaccttcatcaggaagagtggggaaaaaaatgaaccaaactctaaaaagccacttaagcaaattagtcttagagactcggttgccatggactagatgccttcccattgccctgttgagaatccgaactgctcctcagagagatgttggcttatccccttatgaaatgttgtgtaagttgctctatttgcactccgctgctgacattcccatgttcgaaacaaaagatcagtttctcagaaattatatacttaagtttatcttccactttctcttgcctcagaactaaaggtcttttagcacaggcaccacccctagagtttccagtacaccaacatcagcctagggaccacatccttgtcaaaagttggagggaaggaaaacttgaaccagcttaggaaggaccctgcctagtgcttctaaccattgagaccacagttcaaacagcagaaatgggatggactcatcacacccaggtcaaaagagcaccacctcctccagaatcatgggcagctattctagggcttactctaaccaagctaaagctaaaacgggtttgatcctcttatgttgcatctcttcttttccccatctattgctagtcctcttgttattaatgtaactaggtcgagttcaccccaaactattacctttgatgcttgccttgtgatgccctgtggagatgtgccaagccagaggcaactctccacttcagaaaagtatctttgtccttcctagctcttctcagactggaattctgttaactgggataagttagcttgggaagagtttgacggagattccagtataaactgagagtcttgccttcccaatacaaagcttttatgctgtagttggtccaacattctgtggaccactaaagagcaagaatagattgccccaagcagtagttgtaatttcctaaagctatacattcattttactaaaggaacagcttcccctaactgtcagctaaatcagtacaatccagtacaggctattatctcaaaccctctaagttcttccccttctctaagccaatttccttctttaagccagttttataatatgggggctgaggtttcaggagcagaccctatcagatcctttgaaatattcttcattgctcccccaccgcctacaccttcccctaagccttcttccagaacctcccacaacaaaactgttgttcttcctccatctaatgacaagacgaaggtagctattgtagaagtcaaagtcctaaaagaaactttagcaattgagacgggatatcaaaatgccaatgcctggttagaatagataaaatatttcatccgcactttaaacaaaagcaattgttatgctcgtgcgcatggcaggccagagggccagattgtcccctttccactatgatggtcctccagtcaaccaggcatgggctgtatggtagctctttttccaggattccacagcctggggtaacaagtcgtgccaagctctttctctgctatatcccgaagttcaagaccccacaggttagcccccgagggccatccagcttctgtctcccgacactgagttcattttgtgtctctcacgacaaagaggaaacttagcatcccttagagacctaaaaggatgcggtgagcttaagactttccaagagctcaccaaccagtcagcccttatacacccccgagcagatgtatggtgatattgtggtagacctttgctggacactctgcctagtaactggagtgtcacttgcgccctagtgcagttggctatccctttcaccctggcatttcatcaaccagagaaagaaaaaaacacaatgtcataaagcaagggaagccccttatgggtctttcgactcccacatttatttagatgcaattagagtcccacgaggagtaccaaataaatttaagacctgagatcaaatagctgctggatttgagtcaatattttggtgggtgacaattaataaaaacgtagattagataaattccacctattacaaccaacagcggtttattaactatactagagatgctgttaaaggaatagctgagcaattagggcttactagccagatggcttgggaaaatagaatggccttagacatgattttagcagaaaaaggggaagtttgcatcatgattaaaactcagtgttgtaccttcatcccaaacaataccgcccctgatgaaagtataacaaaggcattgcaaggtctaactgctctgtccaatgagttagcaaaaaactcaggagtaaatgaccccttcacagggtggctagaaaaatggtttggtaaatggaaagggatcacagccaccatccttacttctcttgcaattgtagcagtagtgcttatccttgttggatgctgcatcatacctcgcatccgtgggctagtccaaagacatacagaaacagcccttactaaaacttctctcagttcccctccaccatattctgacaagctctttcttttagaaaaccaagcagaacagctatgccaagacatgttaaagaaatttgaagaggaagacctgtaaaattcaaaaggggg

SEQ ID NO: 2005 - DNA, 311 bp, Homo sapiens
  source 1..311: mol_type = other DNA
gctgggcatggtggctcatgactgtaatcccagcactttcgggaggccaaagtgggcggatcacctgaggtcagtagttccaagactagcctgcccaacatggtgaaaccccgtctctactaaaaatacaaaaaatagctgagcatggtggcagaggcctgtaatctcagctactcgggtggctgaggcaggataattgcttgaacctgggaggcagaggttgcagtgagctgagatcgtgccattgcactccatcttgggtgacagagtgagacatcatctgaaaaagaaaaagaaaaagaaaaagaaaa

SEQ ID NO: 2006 - DNA, 75 bp, Homo sapiens
  source 1..75: mol_type = other DNA
cagtgtaatgcaataaaaagagttgttgacaaggagctggaagccttgagtgtgagcaccagcactgccatccac

SEQ ID NO: 2007 - DNA, 565 bp, Homo sapiens
  source 1..565: mol_type = other DNA
gtgatggttaattctaggtgtcaaattgactgggttaaggaatgcccagatagctggtaatacattatttctgggtatggttgtaagggtagacattagcatttgaatcagtcaactgagtaaaggaattccaccctcatcaatgtgagctgtcatcatcccatctgttgagggccctgacagaatgaaaaggcagagaatgggcaaattctccattcttgagctgggacatcattttctcctgaccttgtatatcagaactgctgattcttgggccttcaaactccaagacttacaccaatcccccaaaacccccaagttccagttctcaggccttacatgttgaactgggagttacaccatgggctcccctggttctccggcctttggaattgaactgaattatgccatcactttcctgtttctccaacttgcagatggtatatcatggggcttctcagcctccataactgcacaagccaattcacacaataaatttcctcctatatatatatctctctatatcctattggttctgtttctctggagaatcctgactgataca

SEQ ID NO: 2008 - DNA, 2856 bp, Homo sapiens
  source 1..2856: mol_type = other DNA
agaaaaataatagaaaagttcaattaaactaagggtaggttttttgaaaaggaacaaaattgacaaaccttcagctagactaagaaaagactcaagtaaataaaattataagtgaaagaggagacattgcaactgataccacagaaatacaaaagattataagagactgctatgagcaattttgtgccaataaattaaataacctaaaagaaagagatgaattcctagaaacatataacctaccaagagtgaaccatgaagaggtagaaaacctgaacagacaaataaccggtaaggagattgaatcagtcattaaaaacttctgaacaagaaaagtctaggacctaagggcttcactggtgaattctagtaaacacttaaggaagaattaacaccagtccttctcaaacttttgcaaaaaatggaagagaagggaacacttccaaactcatcttatgaagtcaacattaccctgataccaaagccagacaaggaaattgcaagaaaaaaattacaagctaatatgcctggtgaacacagatgcaaaaatccctcagtaaaatacaaatagtctaaattgaacagcacattgaaaggatcacatcctgatcaagtgggatttatccttggcatgcaaggatggttcaacacatgtaaatcaataaatgtgacatacaacattaacagaatgaagaataaaaatcatatgatcatctcagtagataaagaagaagtatttgaaggaacatatgttgacataataaaggccatatatgacaagcttatagctaacataatactcaacagtgaaaagttaaaagcttttcctccaagattagggcaagacaagaaactcactcccaccacttctattcaacctagtactggaaatcttagccagagcaattaggcaagaaaaagaaataaaagagattcaaatcaaaaagaaagaagtaaaaatttctctgtagatgacataatcttatatgtacaaaacttgtgatcttatatatcgaaaacaccaccaagaaacttttagaactagtaaacaaattcagtaaagttgcagaatgcaaaatcaacatacaaaaatcagttgtgtttctatatattaacaaggaacagagaaagaaattaagaaaacaatcccatagcatctaaaacaattaaatacttaggaaaaaaataaaccaagtaggcaaaggatctgtacactaaaaaactgtagaacatggatgaaagaagttgacaaaatcacaaataaatgggaagatatactgtgttcatggattggaagtattaatattgttaaaatgtccatactacctaaagcaatccatggattcattgcaatccttatcaaaattccaatgttatttttcttagaaatagaaaaaacaatcctaaaattatatggtaccacaaaagattccaaatagccaaagcaatatggagcaagaagaacaaagctggagccaccatattgactgttttaaaaatatactacaaagctatagtaatcaaaacagtataatactggcacaaaaacagacatatagactaatgaaatagaatagagaacctagaaataaatctatgcacttacagtcaattaatcctcaacaagggtgcaagaacacacaatgaggaaaatatagtgtcttcaataaatggtgttgcaaaaactgaactccagatgcacaaaagtgaaattgaactatgtctcataacatatacaaaaagcagctaaaaatgaattaaatacttaaacattagagctgaaactgtaaaactactagaagaaaagatagggaaagatctttttgacattggtctggacaatgatttttttggatatgactccaaaacataaggaccaaaagcaaaaatagacagatggaattgcatcaaactaaacaggttctgtatagcaaaggaaacaatcaacagagtgaatatacagcctataggaattggagaaaatatctgcaaaccacacagctgatgagataatatccgaagtgtttaaggaactcaaacaactcaatagcaagaaaacacataacccaatagaaaaatgggcaaaaactggaatagacatttttccaaagaagacatacaaatggccaattggtatatgaaaaaattctcagtgtcactaatcatcaggcaaatgtaaatcaaaaccacaatgagatactacctcacacctgttaggacagctattatcaaaagagaagagttaagggatgacaaagatgtggagaaaagggagccctgacacaatgttggtgggaatgtaaattggtatagccattatggaaaatagtatgaaggttcctcagaaaaattaaaaatagaactatcatgtgatacagcaatctcatttctgggaatatatccaaaggaaatgaaatcagtatgtcaaagaaatatctgcattcccatgttcattgcagcattattcacaatggccaagatgtggaatcaaactaagtatctattgacagatgaataaagaaaatgattgtacatacaaacttacaatgtgtgtattaatcagcactaaaaaagaagaaaatcctgtcatttgtgacaacatggatgaagctggaagacattatgctaggtgaaataagccaagtacagaaaaacaaatattgcatggtctcatatgtggatactaaaagagttaaactcctagaagcagagggtagattagtgattgccatgggctgggagaaatgggtacaatgtttcagttatgctgaatgagtaagtttggagatctaatgtacagcatggtaactgtagttagtaatcctgtattgtacacttgaaattcactaagagagt

SEQ ID NO: 2009 - DNA, 1564 bp, Homo sapiens
  source 1..1564: mol_type = other DNA
actttacaaaggaggaaaaatctcaaatcaataattgaagttcctacctccagagactaaagaagggagagcaaaataaacccaaagcaagcaaaaagaaaatgacaacagaaataaaattgaaaatagaagaaaaatcagtgaaacaaaaactacttttctaaaaaccaatacaattgatacatctctagcaagactgacaaaagagcaaagccacaaatccattacaggaatgaaacgggatactgctaaagttcctgcagcctttaaaagaataactgaggtactaagaacaactttatgctcataagttagacaacttaaaagaaattgaccgattatttaaaaatcacaaattataaaaattcaaccatgatgaaatagataacctgaatagtcgtataacaattaaagaaactgaatttgtaatttaaaatcttctgaagagatcttcatattgagatagtttcaatgaaaaattctaccatctaaaaacgaactaacaccaattttacagtcttttccagaaaacagaatatgagggagtacttcccaacttattttaatgaggccagtattaccttgacaccaatattaaacaaaaacagtaccaagaaaacccccaccgacctacagactattatctctaatgaacttaaatgcaaaattcctcaactgaatattagcaaaccaagtccaacaacgtatcaaaaattatacaccatgaccaagtgggatttattgcagaaacagggctggttcaatatttaaaaatcaatcaatataatctatcgtatcaacaggctaatgtgatcaattgacacaaaaaaaatttaacatactccaatatctagtcatgatacaaattatcagcaagttagcaagagtagaattatctcaatttgataaaaaatgcctgcaagaaaccccagccaacaatatactaaaagtgaaagagtgtatgtgttttggttaatatctgaaacaaggcaaggatgtactctactaccattgtattccatatagaattggaggttctagccacagaaataagggaagaaaaagaaaagacatatagattgaagaggaagaaataaatcccttcctatttgtagatgacatgatgtcaacattaaaaaattccagggaatttaaataaagaattaaatatgtctatgtaacaggatacaagaacaacaaatgaaaattaatagcatgtctatatacaatggacatgcagtaaccaaaattaaaaacacaatagtatttacaattgctctaaacaaaacatttaggtatacaattaacaaaacatataagaaaaacattcaggtatacaattaacaaaacatataagatctatgtgttgaaaatcacaaaatgttaatgaaaggattcaaagacctaaacagagacacagtgtatttatgaattagaagttcatcatagtaaagatgtccattctccccaagttgatccacaggtttaatacaattcctatcaaaaccccagtaaggtttcagtaaggtttttttgtagatacatacaagaatattctaaaatt

SEQ ID NO: 2010 - DNA, 461 bp, Homo sapiens
  source 1..461: mol_type = other DNA
gttcaagcactattcacaatagcaaagacatggaatcaacctaggtgtccatcaatggtggattaaataaagaaaatgtggtatgtatatacttataaaacatataccatgggatactaaacagacatacagaagaatgaaatcatgtgctttgcagcaacatggatatagttagaggccattatcctaagcaaattaatgtaggaaccgaaagccaaacaccacatgttcttacttataagagggagctaacaatgaatactcatagacacaaagatggcaataatagacactgggaactactacaggggaaagagaaggagggaggtaagagttcaaaacctattgagtacatgggtgtcaaaatccattattgcccaaacctcagcattacccaatatacccaggtaacaaaatctgcacatgtaccccttgaatctaaaagatgaaattgtaaataa

SEQ ID NO: 2011 - DNA, 105 bp, Homo sapiens
  source 1..105: mol_type = other DNA
ttcattctggagatggtgagtcccagaagatcatggccaagatgatgtcctaagtagcttcctctgagattttatgcccaagagggagccatctggccacttgct

SEQ ID NO: 2012 - DNA, 58 bp, Homo sapiens
  source 1..58: mol_type = other DNA
atcctgaaatctgaaacacttgtggttccaagcattttggataaggcaaattcaactt

SEQ ID NO: 2013 - DNA, 305 bp, Homo sapiens
  source 1..305: mol_type = other DNA
ccaggcgtggtggctcatgcttgtaatcccagcacttcaggaggctgagatgggtggatcacctgaggtcaggagttcaagaccagcctggccaacatgtggaaacctcgcctcaactaaaaatagaaaaaaattagttgggcatggtggtgggcacctgtaatcccagctacttcaggaggctgaggcaggagaattacttgaacccaggaggcggacgttgcagtgagccgagcttgtgccattgcactccagcctgggcgacaagagcaaaactcttcaaaaaacaaaacaaaacaaaaaaa

SEQ ID NO: 2014 - DNA, 298 bp, Homo sapiens
  source 1..298: mol_type = other DNA
gccaggcaaggtggtgtgtgcctgtaatcccagcactttgggaggccaaggcaggtggatcacttgcagtcaggagttcaagaccagcctgtccaacgtggtgaaaccccatctctactaaaaatacaaaaattagccaggggtggtggtgcacgtctgtaatcccagctactcaggaggctgaggcaggagaatcacttgaacccgggaggtggaggttgcaatgagccaatatgacaccgctgcagtccagcctgggccatagagtgagactctgtctcaaaaaaggaaagaaaaa

SEQ ID NO: 2015 - DNA, 284 bp, Homo sapiens
  source 1..284: mol_type = other DNA
ggccgggcgcggtggttcacgccagtaatcccagcagtttaggaggccaaggcaggcggatcacctgaggtcaggggttggagataaacctggccaacgtggtgaaacctcgtctttagtaaaaaatacaaaaattagccaggttttgtggcacatgcctgtaatcctagctactcgaaaggctgaggcatgagaatcgcttgaactcaggaggaggttgcagccaaccgagatctcgccgctgtactccagcctgggcgacagagcgagactgtgtcaaaaca

SEQ ID NO: 2016 - DNA, 365 bp, Homo sapiens
  source 1..365: mol_type = other DNA
tgtcaggcctctgagcccaagcctgcacgtatatatccagatggtctgaagcaacagaagaatcacaaaagaagtgaaaatggccagttcctgccttgactgatgacattaccttgtgaaattccatctcctggctcagaagcacccccactgagcaccttgtgacccccacccctgcccgcaagaacacaaccccctttgactgtaattttccactacctacccaaatcctataaaactgcccacccctaactccctttgctgactcctttttggactcagcccgcctgcacccaggtgaaataaatagctttattactcacacaaagcctgtttggtggtctcttcgcacggacgcgcctaac

SEQ ID NO: 2017 - DNA, 47 bp, Homo sapiens
  source 1..47: mol_type = other DNA
ggagtttgagaccagcctgggcaacacagtgagaccctgtctctaaa

SEQ ID NO: 2018 - DNA, 310 bp, Homo sapiens
  source 1..310: mol_type = other DNA
ggctgggctcagtggctcatgcctataatcctagcactttgggaggccgaggcgggtggatcacctgaggtcaggggttcgagaccagcctggccaacatggcaaaatcctgtctctactaaaaatacaaaagttagccaggcgttgtggtgggcgcctatagtcccagctacttgggaggctgaggcagaagaatcacttgaacccagggaggcggaggttgcagtgagccaagatcgcaccactgcactccagcctggctgacagagtgagactccttctcaaaaaaaaaaaagaaagaaaaaagaaa

SEQ ID NO: 2019 - DNA, 298 bp, Homo sapiens
  source 1..298: mol_type = other DNA
ggctgggcacggcgactcacgcctgtaatcccagcacattgggaggccaaggcaggcagatcacgaggttaggagttcgagaccagcctggccaacatggtgaaaccctgtctctactgaaaatacaaaaattagctgggcgtggtggtgggtacctgtaatcccagctacttgggaggctgaggcaggagaattgcttgaacccaggaggcagaggttgcagtgagccgagatcatgccattgcactccgactctgggcaacagagcaagactctgtctcgggggaaacaaaaaaaa

SEQ ID NO: 2020 - DNA, 301 bp, Homo sapiens
  source 1..301: mol_type = other DNA
ggcctgggcatggtggctcatgcctataatcccagcactttgggaggccaaggcgggtggctcacttgaggctaggagttcaagactagcgtggccaacatgaggaaaccctgtctctactaaaaatacaaaaattagctgggtgtgttggtgcatgcttataatcccagctacttgggaggctgaggcaggagaatcgcttgaacccaggaggtggaggttgcagtgagccgagattatgccactgtactccagcgtgggtgacagagtgagactctgtctcaaattaaaaaaataaaaa

SEQ ID NO: 2021 - DNA, 560 bp, Homo sapiens
  source 1..560: mol_type = other DNA
ccttacactaaactgacaactctgtcaccaactttacagagaaaacagaagccatcaggtgcaaattccttctttttctctctgccctacctcacacctgagcttatgattatccataatcttttttttaccccatcaggagtcacagataaaggattcattctcctatccccacaactaatacgtgcccaggatcccatttctatctattccaagttactctaccagtgagttgtcttctcatttttctgttccttcaacctctccctctccactagctggtttccctcacaggaccaacacgcatgtgcagtatttgcttccacctgaaaacaaaacaaaagactcttttatcccacaatattctttagccactgccctgacccttttttccttctgagttaagctcctcgaaagtataataatttagactggatacctcctttaactcacctcctattcactgaaacatggattctgcccttattgctccacagaaactgctctccctaaggccattaatgagcttttaaacaccaaatctaaatgtcacttttcaa

SEQ ID NO: 2022 - DNA, 406 bp, Homo sapiens
  source 1..406: mol_type = other DNA
tattactctcttagccctgcaccaaacctccaatctagccacatttaactcttcatttcttagacccgcagagtgtcttcctgcctctgagctgtgagtgttgttccctttgcccgggatgctcttgtttttaataccagttcaagtcccactctctcagtgaagcactcccttccccactatagcctttagtgaaccctcgtttcttgcttctttattatctgtactgttgtccacttggcaattgttcaggcctctgtgttgttactgatttttgtatgtatatatatatatatgtcttgtttttccaactagattgtgagctccttaagggcagagccatgaattatacctctttgtatccccagtgccttgcatacagtaagcactcaataaatatttaatg

SEQ ID NO: 2023 - DNA, 82 bp, Homo sapiens
  source 1..82: mol_type = other DNA
tcacacctctatctctaagccttacttataaaatgagggtatttggactaaagtcttcttccagttctagaattctacaact

SEQ ID NO: 2024 - DNA, 104 bp, Homo sapiens
  source 1..104: mol_type = other DNA
tgggaggcagtgggccttccactcccaattctgatatgaactagctgtgcagccgtgggcaccccgccttgctggtccctagcttccgcatctgtgaaaggagg

SEQ ID NO: 2025 - DNA, 83 bp, Homo sapiens
  source 1..83: mol_type = other DNA
tttgtttaccgctgtatctcccacagcttgaacagtaccaaggtacgtagtaggtgctcaataaatgactattgaataaatga

SEQ ID NO: 2026 - DNA, 307 bp, Homo sapiens
  source 1..307: mol_type = other DNA
gccgggcatggtggctcacacctgtaatcccagcactttgggaggccgaggcgggcggatcacctgaagtcaggagtttgagaccagcctgaccaacatgatgaaacctcgattctactaaaaatacaaaaattagccaggtgtggtggcatgtgcctgtaatcccagctactcaggaggctgagacaggagaattgcttgaacctgggaagcagacgctgcagtgagctgagattgtgccattgcattccagcccgggcaacaagagcgaaattccgtctcaaaaaaaaaaaaaaaaaaaaaaaaa

SEQ ID NO: 2027 - DNA, 212 bp, Homo sapiens
  source 1..212: mol_type = other DNA
ggcacacctgggttcaaattctagctccagcatataagtggctgtgcagactttggtaagatgtttaatcttttgtgcctcgatttctccatttgtaaaatggagcaaatacctacctcacagggttgttgtgagggttaaattaaatgagattatgtaaaagtatctagcacagttgcctagcacattgtgggtactcaataaaaggtaac

SEQ ID NO: 2028 - DNA, 30 bp, Homo sapiens
  source 1..30: mol_type = other DNA
tccatccttccctcaggtcaagaactttgg

SEQ ID NO: 2029 - DNA, 1031 bp, Homo sapiens
  source 1..1031: mol_type = other DNA
acagacaaacaaagaacatcaaaatcggaaaggaagaagtcaaattatccttgtttgcaggtgatgttatatttggaaaaacctaaagactccaccaaaaaactattagaactgataaattcagtaaagttgcagcatactaaatcaacatacagaaatcagtagcatttctatatgccaacagcgaataatctgaaaaagaaatcaggaacataatcccatttacaatagctacaaataaaatacctaggaattaactttaccaaagaaatgaaagatctttacaatgaaaactgtaaaacattggtgaaagaaattgaagaggacacacacacaaaaaggaaagatattccatgttcatagattggaagaatcaatattgttaaaatgttcatactacccaaagcagtcacagattcaatgcaatccctatcaaaatatgacattcttcccagaaatggaaaaaacaatcctaaaatttatatgaaatcataaaaggcctagaatagccaaagctatcctgagaaaaaagaacaaaataggaggaatcacataacctgacttcaaattatactacagagccgtagtaaccaaaacagcatggtactggcataaaaacagacacatagaccaatgaaacagaatagagaacctagaaacagttcatacatctacagtgaactcatttttgacaaaggtgccaagaatatgcactggggaaaggacagtctcttcattagatggtgctggggaagctgaatatccatacacagaagatcgaaactagctccctgtctctcaccacatacaaaagccatatcaaaatgaatttacgactcaaatctaagacctgaactatgaaactactaaaaacaacattggggaaactccctgggacatcagactgggcaaagatttcttgagtaaaaccccacaaacacaggcaaccaaagaaaagatggacggatgggatgacatcaagttaaaaaagctctgcacaacagaggaaacaatcagaaaagtgaagagta

SEQ ID NO: 2030 - DNA, 327 bp, Homo sapiens
  source 1..327: mol_type = other DNA
gactgggcgcagtggctcatgcctggaattccagcactttgggaggccaatgcaggaggatcacctgaggtcaggagttcaagaccagcctggccaacatggtgaaacccgtctttattaaatatacaattattagctctctattaaaaatacaaaaattagctgggcatggtggtgggtgcctgtaatcccagctacttgggaggctgaggcaggaaaattgcctgaacccaggaggcggaggttgcagtgagccaagattgtgccattgcactccagcctgggaaacaagactaaaactctgtctcaaaaaaaaaaaaaaaaaga

SEQ ID NO: 2031 - DNA, 276 bp, Homo sapiens
  source 1..276: mol_type = other DNA
ggccggacacggtggctcaacgtctgtaatcccggcactgtgggaggccaaagcgggaggatcgcttgagcccaggagttcgagaccaacctggccaacatggtgagaccccatctttacaaaaaaatatatatatccaggcatagtggtgtgcacctgtggtcctgtggtcccagctactcaggaagctgaggcagttgaggctgcagtgagccacgttctggccactacactccagcctgggcatcaaagtgacaagaccaaaaaaaaaaaaaa

SEQ ID NO: 2032 - DNA, 138 bp, Homo sapiens
  source 1..138: mol_type = other DNA
agtccaagttcctccctctctcttgcttctggagctccttgtagttacatctattatagtatcattatatcaagttataacaatctgtttccctttatctcctctagtggcctgggaacctctaagaggcaaacacag

SEQ ID NO: 2033 - DNA, 111 bp, Homo sapiens
  source 1..111: mol_type = other DNA
gagttcaggtcctggctctacaatttactaacagtgtgactgggcagatcatccaccttcctgatgctctcccaaatcaattccctgttctagaatataacaggagatttg

SEQ ID NO: 2034 - DNA, 273 bp, Homo sapiens
  source 1..273: mol_type = other DNA
atgatgttttggtcaatgatggactgtatatatgacagtggtctcataagattaaaatagcatatttttactgcaacttctatgtttagatacacaaatacttaccattgtgttacaactgcccacagtattcagtacagtaacaggctgtacaggtttgtagtctaggagcaataggctataccatgtagcctatgcgtgtagtaggctacaacacctaggtttgtgtaagcatttctcagaacatgtccccgtcattaagtaacacatgac

SEQ ID NO: 2035 - DNA, 50 bp, Homo sapiens
  source 1..50: mol_type = other DNA
attctggaccacataaataaagacaacaccctagagatggtgaagtaagt

SEQ ID NO: 2036 - DNA, 323 bp, Homo sapiens
  source 1..323: mol_type = other DNA
gtaaactaaaatcctaagccccctaattgactgaatggaacccctcttgaccaaagtgaccccagaaaaaccttaaaactgagttcctggccatgacgggatgggaggtcagacacgcttcattatatctccgtctcttttatggtttagacacaacaactgaccagcattaatgtcaaaataaagatcataaggctgacagaatagaccctttgtggcaataacaaattattcgtaagatctaaggtcatgccaggcaagtgttatgtcatgcactcctacacttaaagaataaactatgttctaactgccacaagattttc

SEQ ID NO: 2037 - DNA, 364 bp, Homo sapiens
  source 1..364: mol_type = other DNA
taaatctacttcagaatatctgtctgaaggaagtactcaaaaacattacaaagatttgtgaacaaaaaggcatgtgttactctgtggttactcaaaagaaaagttaaaacacctaaaatacagaacagtgaaatagttatggaacatctatatgatagactattatactaccaataaaaatatttgaaaagaatcttcaacatgaaaaaatgcttatactctaatgttaaacaaaaaataattcaaaattatttttgttcccaactatgtaaaaaatatacatagcaggctagaagaaaatacacaaaaatgttataatgaggttacccacagatggtgaaattacagaggactttttttcctt

SEQ ID NO: 2038 - DNA, 210 bp, Homo sapiens
  source 1..210: mol_type = other DNA
aatactggttaacacatacaatagaaagtagtatacagagaaagtatgtatgcaatactattagccaaacaaaatacacagaacaagaaattttattatctccaatgctggtgcatgacaaataacaagcttaattagaggaggagacagagggaaacttcagataccaaggtaatttctgggcaggtttaaaacctttaaaagttgata

SEQ ID NO: 2039 - DNA, 60 bp, Homo sapiens
  source 1..60: mol_type = other DNA
tgtgctttttttacctttagcttccattgaagattgacatcattaaacatccaaatgaaa

SEQ ID NO: 2040 - DNA, 295 bp, Homo sapiens
  source 1..295: mol_type = other DNA
tggatacagtggctcacacctgtaatcccagtgctttgggaggccgaggcagatggatcacttgaggccaggagttccagaccagcctggccaacacggcgaaaccccatctctactaaaaatacaaaaaattagccaggcctggtggtgcacgcttgtaatcccaggtacttgggaggctaaggcaggaggatcacttgaacccaggggaggctgcagtgagctgagatcgtgccactgcactccagcttgggcaacagagcaagactccatcttaaaaagaagaaagaaagaa

SEQ ID NO: 2041 - DNA, 287 bp, Homo sapiens
  source 1..287: mol_type = other DNA
gcttggcaccctggcttatgcctgtaatcccagcactttgtgaggccaaggtgggcggatcacctgagctcagaagtttgagtccagcctggctaacatggtgaaaccccatctctaaaagagtacacagtcctagagcagtggtgtgcgcctgtagtcctagctacctgggaggctgaaccaggagaattgcttgagcctgggaggcagaggttgcagtgagccaagatcgcaccattacactccagcctgggtgacagagagagaccctgtgcccctcaaaaaaa

SEQ ID NO: 2042 - DNA, 176 bp, Homo sapiens
  source 1..176: mol_type = other DNA
atactgaaatgttgaagaggaaattatattaatatctgggacttgtttccaaatttggaattggggcagggtgtaaattgttggcaatatcaaagaaacgaggagttggaatgataattgtagaagctgcatgatagatacacattctttatacttctgtatatgttgaaattttt

SEQ ID NO: 2043 - DNA, 81 bp, Homo sapiens
  source 1..81: mol_type = other DNA
attgatctgttttacaggaaacaaaccttgccttgaaatttacacagtgagactgtacataattgcatgaaaatagctatt

SEQ ID NO: 2044 - DNA, 119 bp, Homo sapiens
  source 1..119: mol_type = other DNA
agtaatcccctttatctgcaatttcactttctgtagtttgttacctgaggcaaccttggtccaaaaatattatgtggaaaattccagaaataaacaattcatgttttaaatcataagcc

SEQ ID NO: 2045 - DNA, 308 bp, Homo sapiens
  source 1..308: mol_type = other DNA
gccgggcatggtggcacatgcctataatcccagcactttgggaggccgaggcgagtggatcacctgaggtcaggagttcgagaccagcctggccaacatggtgaaaccccatctctactaaaagtacaaaaattggctgggcatggtggcggacgcctgtaatcccagctacttgggaggctgaggcaggagaactgcttgaacccaggaggcagaggttgcagtgagccaagatcgcaccactgcactccagcctgggcaagagtgagactccatctcaaaaaaaaaaaagaataaaataaaataaa

SEQ ID NO: 2046 - DNA, 142 bp, Homo sapiens
  source 1..142: mol_type = other DNA
cacaagccatcctgagtgatgaaatctcatgatctcctgctctgtcctgcctgggatgtgaatcacccctttgtcctgcttatccacactgtatactacctgccccttagtcacttagtagccgccttggttgtcagactga

SEQ ID NO: 2047 - DNA, 98 bp, Homo sapiens
  source 1..98: mol_type = other DNA
aaaaaacatagttgataaagggttcagtactatctgaggtttcaggcatccactaggggtcttggaatgtatctcttacagataaggggagactactg

SEQ ID NO: 2048 - DNA, 215 bp, Homo sapiens
  source 1..215: mol_type = other DNA
gcatacaagttattcaataatcttgtgctgatgacctaaaaatatgtcttaactattcatcaaggaaagcctggtgaagcctttacttgttactacttcaacagttggaattagttgctctttttacttgatgaaacaaaactatacctctgaatatttatggatactttttactaaatcaggcttgtgttcttaatccaaattagtaaagtttt

SEQ ID NO: 2049 - DNA, 100 bp, Homo sapiens
  source 1..100: mol_type = other DNA
ttgagcctaggagtaaggttgcagtgagctgtgattgcactactgcactagagctcaggtgacagagcaaggccctatcctaaaaaaaaaagagaaagaa

SEQ ID NO: 2050 - DNA, 300 bp, Homo sapiens
  source 1..300: mol_type = other DNA
ggcctggcgcagtggctcacgcctgtaatcccagcactttgggaggccgaggcgggtggatcaggtggtcaggagttcaagaccagcctgaccaacatggtgaaaccctgtctctactgaaaatacaaaaatcagccaggcttggtggcatgcgcctgtaatcccagctacttgggaggctgaggcaggagcatcacttgaacctgggaggcagaggtggcagtgagtcaagatcacgctgctgcactccagcctgggtgacagagcgagactccatctaaaaaaacaaaaagcaaaaaa

SEQ ID NO: 2051 - DNA, 2817 bp, Homo sapiens
  source 1..2817: mol_type = other DNA
aaggatatccaggaattgaactcagttctgcaccaagcagacctaatagacatctacagaactctccagcccaaatcaacagaatatacattcttctcagcaccacaccgcacttattccaaagttgaccacatagttggaagtaaagcactcctcagcaaatgtaaaagaacagaaattataacaaactgtctctcagaccacagtgcaatcaaactagaactcaggattaagaaactcactcaaaaccgctcagctacatggaaagtgaacaacctgctcctgaatgactactggatgcataacgaaatgaaggcagaaataaagatgttctttgaaaccaatgagaacaaagacacaacataccagaatctctgggacacatttaaagcagtgtgtagagggaaatttatagcactaaatgcccacaagaaaaatcaggaaagatctaaaattgacaccctaacatcacaattaaaagaactagagaaccaagagcaaacacattcaaaagctagcagaaggcaagaaataactaagatcagagcagaactgaaggagatagagacacaaaaaacccttcaaaaaatcagtgaatccaggagctggttttctgagaagatcaacaaaattgatagaccgctagcaagactcataacaaagaaaagagagaagaatcaaatagacgcaataaaaaatgataaaggggatatcaccacagatccaacggaaatactaccatcagagaatactataaacacctctacgcaaataaactagaaaatctagaagaaatggataaattcctggacacatacaccctcccaagactaagctgggaagaagttgaatccctgaatagaccaataacaggctctgaaattgaggcaataattaatagcctaccaaccaaaaaaagtccaggaccagatggattcacagccgaattctaccagaggtacaaggaggagctggtatcattccttctgaaactattccaatcaatagaaaaagagggaatcctccctaactcattttatgaggccagcagcatcctgatactttggtcgtctgtcatcctgacagagacaccacaaaaaaaagagaatttaagaccaatatccctgatgaacattgatgcaaaactccgcaataaaatactggcaaaccaaatccagcagcacatcaaaaagcttatccaccatgatcaagtgggcttcatccctggaaggcaaggctatttcaacatacacaaatcaataaatgtaatccagcatataaacagaaccaatgacaaaaaacacatgattatctcaatagatgcaaaaaaggcccttgacaaaattcaacagcccttcttgctaaaaactctcaataaattaggtgttgatgggacatatctcaaaataataagagctatttatgacaaacccacagccaatatcatactgaatgggcaaaaactggaagcattccctttgaaaactggcacaagacagggatgccctctctcaccactcctattcaacatagtgttggaagttctggccagggcagtcaggcaggagaaagaaagaaagggtattcaattaggaaaagaggaagtcaaattgtccttgtttgcagatgacatgattgtatatttagaaaaccccattgtctcagccccaaatctccttaagctgataagcaacttcagcaaagtctcaggatacaaaatcaatgtacaaaaatcacaagcattcttatacaccaataacagacagacagagagccaaatcatgagtgaactcgattcacaattgcttcaaagagaataaaatacctaggaatccaacttacaagggatgtgaaggacctcttcaaggagaactgcaaaccactgctcaacgaaataaaagacgacacaaacaaatggaagaacattccatgctcatggataggaagaatcaatatcgtgaaaatggccatactgcccaaggtaatttacagattcaatgccatccacatcaagctaccaatgactttcttcacagaattggaaaaaactactttaaaattcatatggaaccaaaaaaggggccacattgccaagacaatcctaagccaaaagaacaaagctggaggcatcatgctacctgaattcaaactatactacaaggctacagtaaccaaaacagcatggtactgctaccaaaacagagatatagaccaatggaacagaacagagccctcagaaatagtaccacacatctacaaccatctgctctttttttttgttacaaaaaagacaggtttgttacaaacctgacaaaaacaagcaatagggaaaggagtccctgtttaataaatggtgctggaaaaactggctagccataggtagaaagctgaaactggatcccttccttacaccttatacaaaaattaattcaggatggattaaagacttacatgttagacctaaaaccataaaaaccctagaagaaaacctaggcaataccattcaggacataggcatgggcaaggacttcatgtctaaaacaccaaaagcaatggcaacaaaagccaaaattgacaaatgggatctaattaaactaaagagcttccgcacagcaaaagaaactaccatcagagtgaacagccaacctacagaatgggagaaaatttttgcaatctacccatctgaccaaggggtaatatccagaatctaaaaagaactcaaatttacaagaaaaaatcaaacaaccccatcaaaaagtgggcgaaggatatgaatagacacttctcaaaagaagacatttatgcagccaacagaca

SEQ ID NO: 2052 - DNA, 94 bp, Homo sapiens
  source 1..94: mol_type = other DNA
agattgcagtgagccgagatcctgccactgcactccagcctgggcgacagagcaagaccccatctcaaaaaaaaacacaaaaccaaacaaacaa

SEQ ID NO: 2053 - DNA, 136 bp, Homo sapiens
  source 1..136: mol_type = other DNA
agagcagactacaaagcaatgtacattatgatttcatttttgagaatataaatgcataactatgcatagaaaaataagcaaaaacacaacatcaaaatgttaacagagtttatctccctagatggcaggattacag

SEQ ID NO: 2054 - DNA, 674 bp, Homo sapiens
  source 1..674: mol_type = other DNA
cgcacacacacacacacaaacaaacgtctactatataaacatcatattggctaaaattaaaatctggccacaccaagtgttgataaacaagcactctcatacatcatggaagcagaggtgggaatataaaattttaaaggtgtgcgtaccttataactgagcaattccactcctaggtacacatcctatggaaacatgtttatgtacacaaagatgcttactgaagcattacttataatagccaaaaactgaaaatctcaaagcactcatcaaagtggaataatagcggtattaatgaaatagcacattatacagcaatgaatatgaatgaaacacaccatgtgacacgaatcttatatgcgatgttgaaagacaccaaacacgacatatagtattattctatttttatataagtcaaaagtgagcaaaatgtaaaccatattgttatacacataactggtaaaataattcttaaaaggacagagggagaattaccatacgtcaggatagttagctctgggggaaacagtgagtgtcaagaggggacacacagagattttggagtgctggcaagacctcctctgcatctagtttgtgattacacagctgttgctttacccattaagctctgttttaagtacttatttgtaagttatatttcacaaaatttaaaa

SEQ ID NO: 2055 - DNA, 317 bp, Homo sapiens
  source 1..317: mol_type = other DNA
cttctcattcaacctcctgtaaggttttctgtcacctgaggagtctaaattctaagtatggcattcgaggccttttacaatctggtcttaatctttccactgctcttttcaggacttctcccatgcaggcagtgtttgccatcctcagtgatctgttcccaggagattccatgcatgggcatacctcggtgcctttgtatctgtagtatcttgtttgtcctggaatgtccttcatcatcttctgcacctataaagtcttattgctccatcaaaggccaacacaagtagcatctgccgtgcaaagccttctccaattc

SEQ ID NO: 2056 - DNA, 194 bp, Homo sapiens
  source 1..194: mol_type = other DNA
accgggaacagaactggacgtgccaaaatgcctgaggacacttcatcgaatgtggctggcttgatgggaagctggcatgactagaaatgtcaggagtcttccctctcgaggtttcaagctttgtgtttctgactcaatggtccggattgagatcagatgagtcaagttcagatgaccatgcaaacctttagatg

SEQ ID NO: 2057 - DNA, 164 bp, Homo sapiens
  source 1..164: mol_type = other DNA
cagtggttctagctctagttgcatgggaggatcttcctggggcttttaaattatactgatgcccatgctccatctcagaccagttacatcagacttcccaggtgggaccagggtggcctgggcctcaggaatttttaaagctccccaggtgcttttcatcttca

SEQ ID NO: 2058 - DNA, 1219 bp, Homo sapiens
  source 1..1219: mol_type = other DNA
aaaaaaaatctgaactcaataacctaaactccaccttaagttactagaaaaagagaagcaaactaagcctaaagcaaacagaagaaaagaataataaagattagagttgtgatcaatggaatagataatagaaaaaaaatcatcaaaaccaaaagttggttatttgaaaagattaacaaaattgacaaacctttagctagtctgatgaagagaaataaaagaaagtagtaaagttattaaaaaatgagagaagggcattaccaccaattttacagaaatacaaaaggattttaagagaatataatgagcaactatataccagcaaactggataacctacataaaatggacaaagtcctagaaatataaaaactaccaaaactgacactcaagataaaatagaatacatgaatagacttataaaagtaaatattgagttagcaagaaaaaacttctaacaaagaaaagctcaggaccagatgactccatcaatggattctaccaaacatttaaagaaaagttagcaccaatccttctcaaaatctttccaaaaaaatagcagagggaacactttctaactcattctgtgaggtcagtattaccctgatacttaaaccagaaaaaggtatcccaagaaaggaaagctacaggctaatatctcttatgaatataaatgcaaaaattatcaacaaaatactagcaaacagaatccaacagcatattagaagggctggacattatagctaatgggaatttatcccaggaatgcaaagtttgttcaacatatgaaagtcaatcaatgcaatataccatattaatacaatgaagaggggaaaacccatgtgatcatctcaatagatatagaaaaaggatttaaccaaatctcacatcctttcgtgataaaaactttcaacaaactagaaatagaagggaacttcctaaacctaataaaaggcatctatgaaaaacccacagctaacatcatacttaactgtgaaagactggaagctttccctgtaatatcagaaacatgatatggatgttttctctcaccacttctattcaacattttactagaaattttagccagggcaattagatgagaaagagagttagaaatgagagaagtggaagagagaaagagagaatccagattagaagaaggaagttaaaactacctctattagtggatgacatgattttctaaaaaatcctaaaga

SEQ ID NO: 2059 - DNA, 1935 bp, Homo sapiens
  source 1..1935: mol_type = other DNA
gtaatgtcagagaaaatggtggaataaggaatcccaaaagttcacccttctataaaagctagaaaaaaagtggcaataaccatcagaatgtgctttttcagaactctggaatgtaaccaaatacttgaagtactctgggaagcatttatttaaaaacaaaaacaaaaaaccttagtcaattcttaatgaaaaaagcaaaactgtggtgtcttaacttatctgaatcccatactccaatccccagctcagcagcagccttgaaataacaacccacattcccagtgcaggcatatgagggagcagaatggaccttatttacagaaaattctaatttgatctatctggtggctgccttgaagacatgctactagacacatgtttttatctctcctgactgagaacttgctttatactaagctgctcccaagggagcacggtctaaacattcttctctactgtctaaggcaatggataacaattgggggaaacaatagactagccaaaaaacttggaagcaaagtctagggaatgacatgctgtagggaataaggtctttgaaaaggtcctacatgttcttaagattttagaagaacattcacatgtccagggctgtgcacacactcaggaaaaatgcaggcaggccccagtctcttaactctggctggccattaggctacgcataatcaggaagtgaaggcaaaggctgagtagtaaactgcctggttgagtgttgaaggtatcctcccacccccacacacaatggacacagagccccttggctaggagtggatgatttattagttccaagtgttgaaggatatttctattcaaatattaattggccactaagctaactaagcattcagtggctacacatgacgtagaatacagattttatggaagtaattcggaaaagtgaataaacaacaaataaaataacagcaataatagcaaaccatggagaggagggagaatctgattcccaggttatgatattcaaaatcttcaattttcaattagaaaattacaaagcatgcaaagaaacatcagtggcacataccaggagaaaaaaaaaaagcaatcaacagtaactgtctttgagaaagtgagaaagtgaaaacgagttcattactagacaaagactttaaatcagctattgtaaatatattcaaaaagctgaaactaagtctaaagagttaagttatgagagcaatacctcaccaaatagtgaataccaataaagagatataaattataaaatgggaccaaatagaaattttggaattgaaaagtagaataactaaaagaaaaaattactagaggggcttaacagaagatttgaacagaccaaagaaagaatgagaagacttgaaacaggtaaattgagagtatccagtcagaggaacaagaaagaaaaagatgaagaaaaattaacagagcctaggagaccggaggacattaagcccatcaatacacccataaagagcgtctcagagaagagagagaaaggggtagaaccatgatttgaagaaataatggtgaaactttgcaaatttgataaaaaatatcaatctatacatacaaaaagctcaatgaactccaagtaagataaactagaatagatctgcactgagatacatcataatcaaactgttgaaaatcaaagacgaatagagaatctcaaaagcagtaagagagaagcaacttattatatagaagaaatcctcagtaaaattatcaactgatttctcatcacaaaccatggaggccaaaggcagtgtgatgacattcaaagtgctgaaaaaaaaaaaatactgtaaaccaagaattttgtatcttgcaaaattatccttcaaaagtgaatgagaagttaagaaacctccaaataaataaaaattgagatagtttgtcactatgacacctgacctacataaa

SEQ ID NO: 2060 - DNA, 296 bp, Homo sapiens
  source 1..296: mol_type = other DNA
ggctgggcgcgttggctcacacctgtaatcccagcattttgggaggccaaagcgggcggatgaggtcaagagattgagatcagcctggccaacatggtgaaaccccgtttctactaaaattacaaaaattagctgggcatggtggcgcgcacctgtagtctcagctactcaggaggctgaggcaggagaattgcttgaacccggaagccagagcttgcagtgagccaagatcgtgccactgcactccagcctcgtgacagagtgagaccccatctcaaaaaaaaaaaaaaaaaaaa

SEQ ID NO: 2061 - DNA, 354 bp, Homo sapiens
  source 1..354: mol_type = other DNA
tggtatagtttggctctgtgtccctacccaaatctcatctggaactgtactcccataattctcacgtgttgtgggagggacccagtaggaaataatttgaatcatgggggtggtttcccccataccattgccatggtagtgaataagtctcatgagatctgatgggtttatcaggactttctgctttggcatcttcctcatttttctcttactctcactgtgtaagaagtgtcttttgcctcctgccatgattctgaggcctcccagccatgtggaactgtaagtccaattaaacctctttttttccccagtctcaggtatgtctttatcaggagtgtgaaaatggactaatac

SEQ ID NO: 2062 - DNA, 402 bp, Homo sapiens
  source 1..402: mol_type = other DNA
aactgcataattggaatctcatcataagacaaacccaaagtgatggtcattccatgaagtaactgacctagagtcatcatctgtgtcaaggttatggaagtcaaggaaacgctaaggaagtgttcacattaaaggaaactaaagagacctgacaactagatgtaataggtgattctgaactagtacctttggctataaaggacctgattgagacaatgggtgaaacttgaacggggtcaaaggatttgaaggttataatgtatcagtgctaatttgctgatattgatggttgtattatgtatatgcaggagaatatccttgtatacagggattacacactaaagtattccaggtattggggcatgaggttggcaacttattctcagatgattgagaagaaaa

SEQ ID NO: 2063 - DNA, 224 bp, Homo sapiens
  source 1..224: mol_type = other DNA
ggtatagccaagagagcgtggacttttataatctgatagcctttggtttgaacagctgggtgacttggagcaaattgcagatctgaatctgttccccgctctgtaaaacaggaaaggcaatgcctacctcgcagagttgtttgaggagtaagtatcataaagtatttaaagcacctggcaaagtgcctgacacatagtaggcagtcaataaattatagctatta

SEQ ID NO: 2064 - DNA, 308 bp, Homo sapiens
  source 1..308: mol_type = other DNA
ggccgagtgccgtggctcacacctgtaatcccagcactttgggaggctgaggcaggcagatcactaggtcaggagttcgagaccattctggctaacacagtgaaacctcgtttctactaaaaatatgaaaaattagccgggtgtggtggtgtgcgcctataatcccagcgactcaggaggctgaggcaggagaatcacttgaacccgggaggcggaggttgcagtgagctgagatcatgccattgcactccagcctaggcgacagagggagactccatctcagaaagaaaaaaagaaaaaagaaagaa

SEQ ID NO: 2065 - DNA, 203 bp, Homo sapiens
  source 1..203: mol_type = other DNA
aggggtcagaaaactactgcccatgtggtctgatctggccactgcttgttttcgtaaattttcactgcccacagccaacctcatttgtgtacatgccgtccatggctgctttcacactgcagccgcagcgatgagtcatgagacacgcacccgtggctcacaaagtctaaaatatttactctttggccctttacggaaaacgt

SEQ ID NO: 2066 - DNA, 97 bp, Homo sapiens
  source 1..97: mol_type = other DNA
ctccacctcgaacaagcatccttatttgtaatctgatttgcctataggattctgcataagattttgcttaagcaaagggttctgctgctttttaaaa

SEQ ID NO: 2067 - DNA, 311 bp, Homo sapiens
  source 1..311: mol_type = other DNA
ggccgggcaccgctggtcatgcctgtaatcctcgtactttgggaggccaaagagggtagatcatctgaggtcaggagttcaagaccagcctggccaacatggcaaaaccccatctctactaaaaatacaaaaaattagctggacctggtgacacgtgcctgtaatcccagctacccaggaggctgaggcaggagaatcgctggaacccggaggcggaggctgcagtgagccgagatcgtgtcactgcactccagcctgggtgacagagtgagactccatctcaaaagaaaaaaaaaaaaaaaaaaaagaaa

SEQ ID NO: 2068 - DNA, 263 bp, Homo sapiens
  source 1..263: mol_type = other DNA
acactgggaccaaagtggatttttggaaatgcaaatctcatatctcatgttcttgcttaaaaccctacattggattccggttgctcatagaatataattcaaaccctctaacctggcctcaggtgtcccctgtccagccttccagactcatctttcatctgtccttcccctactcacatacgtgctcgcctttgtagccatactgaactttggtcctccaacatgctctgcattctcacctccatgtgctttcccttatacct

SEQ ID NO: 2069 - DNA, 108 bp, Homo sapiens
  source 1..108: mol_type = other DNA
gaatcgcttgaacccaggaggcggaggttgcagtaagccaaggtcatgccactgcactctagcctgggtgacagagcgagactccatctcaaaaaaaaaaaaaaaaaa

SEQ ID NO: 2070 - DNA, 294 bp, Homo sapiens
  source 1..294: mol_type = other DNA
gctggatgcggtggctcatgcccgtaattctagcactttcagaggccaaggtggccgattgcctgagctcaggagagaccagcctgggcaacatggcgaaaccccgtctctactaaaaatacaaaaaattagccaggtgtggtggtgcacgcctgtagtcccagctactcaggaggctgaggcatgagtatcgcttgaacctgggactcagaggttgcagtgagccaagattgtggcactgtactccagcctgggtgacacagcgagactctgtctcaaaaaaataaaataaaa

SEQ ID NO: 2071 - DNA, 272 bp, Homo sapiens
  source 1..272: mol_type = other DNA
tggctcacacctgtaatcccagcactttgggacacctaggtgggagcatcgcttgaagccaggagttcaagaccagcttgggcaacgtagtgagacccctatctctacaaaaaataaaaaaattagctgggtgtgatggcacacacctgttgtcccagctactcaagaagctgagatgggaggatcctgagctcaggaggtcaaggctgcagtgagccgagattgtgccactgcactgcagctggggtgacagtgcaagaccctgtctcaaa

SEQ ID NO: 2072 - DNA, 311 bp, Homo sapiens
  source 1..311: mol_type = other DNA
gcctggtgtagtggctcacgtgtgtaatcccagcactttgggaggtcgaggcgggaggaaaacctgaggttgggagttcgagagcagcctgaccaacatggaaaaatcccatctttactaaaaatacaaaattagccgggtgtggtggtgcatgcctgtaatcctagctactctggaggctgaggcagaagaatcacttgaacccgagaaggggaggttgcagtgagccaaaatcgcgccattgcactccagcctgggcaataagagtgaaactccgtctcaaacaaaacaaaacaaaaaacaaaacaaaa

SEQ ID NO: 2073 - DNA, 118 bp, Homo sapiens
  source 1..118: mol_type = other DNA
ttggacatggtggcttctgtaatcccaacgactcaagaggctgaagtgagagactggcttgagttctggaccagcttaagcaacatagtgagaacccacgcctaaaaaataagtaaaa

SEQ ID NO: 2074 - DNA, 238 bp, Homo sapiens
  source 1..238: mol_type = other DNA
ggcatcttgatgcagcgggaaaggccctggccttggggtctgaacacccagggtcttggtcgtgggcccattgttgacctgctgggtgactttataagtcatttccccattgcaaccctcagttctgtcatttgtcaaagggggacactaatccctaccctgcctggctcacaaattgaatgggaaaagggtgtgcaagagctttgtagagaatcatggggaaggcaaggggtcatta

SEQ ID NO: 2075 - DNA, 137 bp, Homo sapiens
  source 1..137: mol_type = other DNA
agttgcgtgaccttgggccacttctctcggtttcctcatctgcagaagggagtagacgtgaggctccatgagatcctatgtgtcaaaggactgcagaaactttaaagtgctatacggatgcgagtggctgtggtcat

SEQ ID NO: 2076 - DNA, 1992 bp, Homo sapiens
  source 1..1992: mol_type = other DNA
accctctctcggtgctggggactcagaccctgtcattacaagcaagcccataccctcagcctctgttttgaactctccctaactgacacctggctgcccccaacacaccagttccccctgtttcctctcccacgcccccacagaccctgggattgccttttccaaaacatttgccctccctttccctttctaagtgccatcctctctgaatccatgtccatacactctacctgtcaccactgccccaccgggttgcacctcacattcatcacagacttaactgacacatctgccctgtcttcctccccaccctcatcctatcatcagttttggtgacttcaacatccactttgcagatccacccaacactggtgcctctctcttcctctaccaggtcggtccaaccatttgtcaccctcctccccacctactcccacgggcatcacatcttgtaccatcatgaacacggcaccatccacacaatctccacttcaaacatcccaccgggagaccacctgtcatccttccagatgacaagtgatccctccgcctcgccaagccctcccacccctcaccctcctctgtcaccaccatcagccctctgccatcacatccatctttcatcttcttttctccccttacttcttcatacttaaagaccatgctcaacctgggttaaatccaactacccacctactcaatgcctgcacccacacagcaaaataaaggtagagaaaaaacagactggcttcctctaaattcatagcctgaaatctcaattgggccctggtgttgttccacagcactgctaccgttgtcttgcacgttcccattctccagagcaactgtctcagcctttctcctctccccacacccctcactacccccagcctcacttgcctcatgctttgctcaggaaatagcataaatcagaaaagtcatcttcccatcgtgaaacctggcagcctccctcctgctcctgtggatgaaggccactgctctgcccaaggccattccctccatgtgggttttggatcccacttctgttatctgaaccgtagatacctcctccttctgcacatcgcttcctctttctccattaggtcatccacaacaggctgctctaggatctcctgtgataaacaaacagctccattgggctccacttctctctccagcttccatctcaatgttctgctccccttcactgcaaaaagtgtttaaaaaatcgtctgcacctcctgcctccactttcttagtgggcattctgtccccatggcttagctgactcagcattcatcatgtcaccaccgacccctaagtgtccagttcactttcttttcctttcacttgaactttcagcagtgattgattcaggacctcttcccacttcctataatgctttatacttggcctccactgctccctctcctgggtttcttcctactccctgtctgctccttctcagtctattcagccaactctgccacatgtcccagtctctatgtgcaggataatctcagggggaaccccccggcctctttcttttcttctttcccaatggtcccaagataacttcatcccatccaattgcatcaaataccaggtctccgtcattgactccacgcctccatctccagtcctggctgctccttggaactcccagggtgtgtattcaactgcaggagaatgactaggagccatctcaaaattaatgcatatggctaaaaccaaactcttagcttttgctgcaaacttgctcctcctccctgctccctagacttcccacctctgtcaatgacatcaccacccactcaggtgcttaagcaaaatatcccagagttagctcgaattcccctcttcatcccgcacacccaagctatcagcaagtccctgaccatcccacccccaacacacatcccagtctgtccacattcctccttctccccatggccaccccaatctgggccagcactgcctcactgctgaact

SEQ ID NO: 2077 - DNA, 24 bp, Homo sapiens
  source 1..24: mol_type = other DNA
gcctcagttttcccatctgtaaaa

SEQ ID NO: 2078 - DNA, 303 bp, Homo sapiens
  source 1..303: mol_type = other DNA
gctgggcacggtggctcacgcctgtaatgctgacactttggaagaccaaggtgggcggatcacttgaggccaggagttcgaaaccaccctggccaacatggtgaaaccctgtctctactaaaaatgcaaaaacaggtagccaggcgtggtggcgggcacctgtaatcccagctactcggaaggctgaggcaagagaattgcttgaacccaggaggcagaggctgcagtgagcagagatcacgccattgcactccagcctgggcaacaagagcgaaactccatcttaaaaaaaacaaaacaaaa

SEQ ID NO: 2079 - DNA, 194 bp, Homo sapiens
  source 1..194: mol_type = other DNA
ccggcggcggcgcgcagcgtgtcaggcggagagacccgccgccaggtgaggagcgcggcccgcggggcccggcttgcccggcgctgcccctcccccgcctgctcccttcccccacccggctgcagctaggcgaggcccgcccccggcccctcccggcgcccgagagccggaagcggagggcggccggccggcgc

SEQ ID NO: 2080 - DNA, 56 bp, Homo sapiens
  source 1..56: mol_type = other DNA
cacagagtgcaggtctcaggggcagaagacatgggttccagttctggttctgccac

SEQ ID NO: 2081 - DNA, 83 bp, Homo sapiens
  source 1..83: mol_type = other DNA
tatactgcaatcattgacttgtgtctgctccacttgactataagcaaattgaaggcagggtttgtgccttcataatctctgaa

SEQ ID NO: 2082 - DNA, 304 bp, Homo sapiens
  source 1..304: mol_type = other DNA
ggccgggcgcagtggctcatgcctgtaatcccagcactttgggaggccgtggtgggcggatcacctgaggtcaggagttcgagaccagcctgaccaacatggtgaaaccccatctctacgaaaaatacaaaattagccagatgtgatggcgcatgcctgtaatcccagttactcaggaggctgaggcaggagaatcacttgaacctggggggcggaggttgcagtaagccgagatcgcgccgttgcactccagcctgggcaacaagagtgaaactctctccccccgaaaaaaaagaaataaaaa

SEQ ID NO: 2083 - DNA, 185 bp, Homo sapiens
  source 1..185: mol_type = other DNA
aggggaggagctgctgtagtagcaagggtgctcatgtaggactcaagtgactaccagtccctgttaccagctgtgtggccttgggcaagtctgccagcgtcacttagcctcagtttccttatctgtaaaatgaggatagtaagaactacctcgtagtgatattgcgaaggttagaagaaacgcat

SEQ ID NO: 2084 - DNA, 312 bp, Homo sapiens
  source 1..312: mol_type = other DNA
gccgggcacggtggctcacacctgtaatgccagcactttgggaggccaaggcgggtagatcacttgaggtccaggagttcgagcccagcctggccaacatggtgaaaccctgtctctactaaacatacaacaattagctgggcatggtggtgggtgcctgtaatcccagctactggggaggctgagacaggagaaatgcttgaacccgggaagcagaggttgcagtgagccgagattgcaccacagcactccagcctgggtgacagagcaagactccacctcaaaaaaaaaaaaccacaaaaaaacacaaaa

SEQ ID NO: 2085 - DNA, 310 bp, Homo sapiens
  source 1..310: mol_type = other DNA
gccaggcacggtggttcactcctgtaatcccagcactttgggaggccaaggcgggcagatcacttgaggtcaggggttcgagaccagcatggtcaacatggtgaaacgccgtctctactagaagtgtaaaaactggccgggtgtggcggcacatgactgtagtcccagctactccggtggctgagagaggagagtcgcttgaacccaggaggcggaggttgccgtgaaccaagatcacaccactgcactccagcctgggcaacacagccagactccatctcaaaaaaaaacaaaaaacaaaaaaacaaaa

SEQ ID NO: 2086 - DNA, 344 bp, Homo sapiens
  source 1..344: mol_type = other DNA
gctaaggggtgaatgttcatatgctcccaattcacgttgaagccctaatccccaaagggatggtattgggggtggggtcttggagaggtgattaggttatgagggtggagccctgatgaatgggattagtgctttataaggagagacaccagagagatgatctctctctccaccatgtgaggacacagtgagaagacagccgtctgcaggcccggaagagagccctcaccaggaaatgaaactgttggcaccttgagacttcccagcttccagaactgtaagaaataaatgtttgttgtttaagcctttcaggctacggctttctgttacagcagcctgaactg

SEQ ID NO: 2087 - DNA, 163 bp, Homo sapiens
  source 1..163: mol_type = other DNA
ggaagaaaagaaaggctttgccagcatctgagaccccaaaagctgcagagtctgagaccccagggaaaagcccagagaagaagccaaaaatcaaagaagaggcagtgaaggaaaaaagtccttcgctggggaaaaaagatgcgagacagactccaaaaaagcc

SEQ ID NO: 2088 - DNA, 150 bp, Homo sapiens
  source 1..150: mol_type = other DNA
gactcaaaggcactaacagtgctcatgtgccttccagacggttcaaggcagaggccactgtgctcagtgtagtctgtgatgaatagtttaagtgttcagaaattggtaaaccaacacacgggatacaataactctctgttaaccagaaca

SEQ ID NO: 2089 - DNA, 306 bp, Homo sapiens
  source 1..306: mol_type = other DNA
gccaggcacggtgatcacacctgtaatcccagctctttgggaggccaaggcaggtggaccatctgaggtcgggagttggagaccagcctggccgacatggagaaactgtctctactaaaaatacaaaattagctgggtgtggtggcacatgcctgtaatcccagctacttgggagggtgaggcaggagaatcacttgaacccaggaggcagaggtggtggtgagctgagatcgcaccattgcactccagcatgggaaagaagagcgaaactgtctcaaaaaaaaaaaaaaaaaaaaaaaaaaaaaa

SEQ ID NO: 2090 - DNA, 161 bp, Homo sapiens
  source 1..161: mol_type = other DNA
ggagttggttacacgcactgtggtgcttgcctgtaacagaaaaagattttaacctgtaaaaaaataaacacttgcaaagtgcctaacaacatgaggacatgctgaagctaaaatattaactgggaaacgtaatctataaaattgcttattcagtatgatca

SEQ ID NO: 2091 - DNA, 385 bp, Homo sapiens
  source 1..385: mol_type = other DNA
cactatttataagaaaacctagaaccagtctacacatccaatagtgaggaaatgattagatgaattacagtacatccacaagatggattactaaacagacattggcatgatttatgaagagtgtttaatgtttacaaagagcttttaatgatgtggaagatggtggtataataagtaggaaaaaactggttataaatgataccacaatatgatgtcaacgatgaaaaaatgcacaaaaaaagacttttttaaaacgtcgaaacatcagagtggtctctagttggaggaataattttttttttttttaagacaaacttcttcatactttttgtacttttaaaatgatttactatgtacatggattacttccataatcaagaaaaaa

SEQ ID NO: 2092 - DNA, 295 bp, Homo sapiens
  source 1..295: mol_type = other DNA
gctgggctcagtggctcacacctgtaatcccagcgctttgggaggctggggcacacagatcacctgaggtcaggagttcaagaccagcctggccagcatggtgaaaccccatctctactaaaaatacaaaaactactccggtgtggtggcacaggcctgttttcccagctacttgggaggctgaggcaggagaatcacttgaatccgggaggcagagattgcagtgagccgagatcgtgccactgcactccagtctgggtgacagagcgagactccatctcaaaaaaacaaaaaa

SEQ ID NO: 2093 - DNA, 161 bp, Homo sapiens
  source 1..161: mol_type = other DNA
ggagttggttacacgcactgtggtgcttgcctgtaacagaaaaagattttaacctgtaaaaaaataaacacttgcaaagtgcctaacaacatgaggacacgctgaagctaaaatattaactgggaaacgtaatctataaaattgcttattcagtatgatca

SEQ ID NO: 2094 - DNA, 302 bp, Homo sapiens
  source 1..302: mol_type = other DNA
gctaggcacgatggctcacgcctgtaatcctagcactttgggaggccgaggtgggtggatcgcttgaggtcaggagttcgagaccagcctggccaacatggcgaaaccctgtctctacttaaaaagaaaaaattagctcaccttggtggtggatgcctgtaatcccagctactcgggaggctgaggcaggagaatcgcttgaaccctagaggtgaggttgcagcaagccgagatcacaccactgcactccagccttgggcgacagagtgaaactttgtctcaaaaaaaaaaaaaaaaaaaaa

SEQ ID NO: 2095 - DNA, 161 bp, Homo sapiens
  source 1..161: mol_type = other DNA
gagttggttacacgcactgtggtgcttgcctgtaacagaaaaagattttaacctgtaaaaaaataaacacttgcaaagtgcctaacaacatgaggacacgctgaagctaaaatattaactgggaaacgtaatctataaaattgcttattcagtatgatcac

SEQ ID NO: 2096 - DNA, 297 bp, Homo sapiens
  source 1..297: mol_type = other DNA
gccggacgcggtggctcacgcctgtaatcgcagcactttgggaggccgaggcgggcggctcacgacgtcaggagatccagaccatcttggctaacagggtgaaaccccgtctctactaaaaatacaaaaaattagccgggcgtggtggcgggcgcctgtagtcccagctactctggaggctgaggcaggagaatcaattgaacccgggaggcggagcttacagtgagctgagattgcgccactgtactcctgggcaacagcgagactccgtctcaaaaaaaaaaaaaaaaaaagaaa

SEQ ID NO: 2097 - DNA, 112 bp, Homo sapiens
  source 1..112: mol_type = other DNA
gtgacttttgaggcaaccccttcccttccacagagtttagtttcctcatttgtaaaatgaggacaaacctagatatttttggaagtttcttccagttctaattgcctatgat

SEQ ID NO: 2098 - DNA, 295 bp, Homo sapiens
  source 1..295: mol_type = other DNA
ggccgggcgcggttgctcacgcctgtaatcccagcactttgggaggccgaggtgggcggatcacctgaagtcaggagttcgagaccagcctggccaacatgcgaaacctcgtctctactgaaaatataaaaattagccaggcgtggtggcaggtgcctgtaatcccagctactcaggaggctgaggcaggagaattgcttgaacccggagatggaggttgcagttaagctgagatcacaccactgcactccagcctgggcagcagagcaagactccatctcaaaaaaaaaaaaaa

SEQ ID NO: 2099 - DNA, 205 bp, Homo sapiens
  source 1..205: mol_type = other DNA
gcggctcacctgaggtcaggagttcgagaccagcctggccaacatgaggaaaccccatctctactaaaaatacaaaaattagccgggcgttttggcacacacctgtaatcccagctactcaggagactgaggttgcagtgagccaagactgtgctacggcactccagcctggacaacagagcaaaactgtctcaaaaaaataaaa

SEQ ID NO: 2100 - DNA, 332 bp, Homo sapiens
  source 1..332: mol_type = other DNA
gctgggcatggtggctcacacctgtaatcccaccaccttgggaggctgaggtgggcggatcacgaggtcaggagttggagaccagcctgatcaacatggtgaaaccccgtctctactaaagatacaaaaaattagctgggcgtggtggtgcgtaactgtaatcccagtcacttgggaggctgaaccctcccaaggttctctgaaccccaggagaatagcttgaacccaggagatggagactgcagtgagtcgagatggagccattgcactccagcctgggaaacagggcgagactcttgtctcaaaaaaaaaaaaaaaaaaaaaaagataaa

SEQ ID NO: 2101 - DNA, 141 bp, Homo sapiens
  source 1..141: mol_type = other DNA
cgtggggcggggatggagcacgcgccctggagccccggagccaggtatcacgcgtgtgacgcgtgtccctgaacctacctgcgcttcttgtcccaactctaaaatgggaatgataagcgccattcggcagcgccttgtggg

SEQ ID NO: 2102 - DNA, 88 bp, Homo sapiens
  source 1..88: mol_type = other DNA
gagagaggacccagtgacttgtccaagtttacacacgacactaatctcccctggggaggaagcgggaagccagccaggttgaactgta

SEQ ID NO: 2103 - DNA, 136 bp, Homo sapiens
  source 1..136: mol_type = other DNA
gcccaagaataaagccaactcaaatgaaagcagagctgagagccaaagagacagatccctgtttggagtcctgggatgcagcctgaagcccaatctagcccatccttttcagctacgtgagccattaaattccctc

SEQ ID NO: 2104 - DNA, 234 bp, Homo sapiens
  source 1..234: mol_type = other DNA
tggacagctgatgctttgtcctgcccagcacccattcgtcccttcttcaggtaatatcatctgccaccacaaccaccagcaccaactctcagtctctgtgggtacatgccaggcctgtccatttggtgtattccatcttcctggccacaatgatgacttgaggctggataccttcctcgtctggaccaatgagaaccaaatccagcagttctgtcagcaaaggggagctctttt

SEQ ID NO: 2105 - DNA, 288 bp, Homo sapiens
  source 1..288: mol_type = other DNA
catgcctgtaatcccagccctttgggagacccaggtgggtggatcacttgaggccaagagttcgagaccagcctggccagcaagacaaaaccccatctctactaaaaatacaaaaaaaaattagctgggtgtagtggcgcatgcctgtagtcccagctacttgggaggctgaggcatgagaatcgctcaaaccagggaggcggaggttgcagtgagctaagatggtgccactgcactccagcctgggtgacagagtgagactctgtttcaggggaaaaaaaaaaaaaa

SEQ ID NO: 2106 - DNA, 309 bp, Homo sapiens
  source 1..309: mol_type = other DNA
gccaggcacagtggctcaagcctataatcccagcactttgggatggccttgggaggccaaggcaggagaacacttgggctcaggagaccagcctgggcaacatggcaaaatccccatctctaccaaaataaaataaaaaaaaattacaataaattagccaggcatggtggtgtgtggctgtagtccagctacttgggaggctgaggtgggaggatcacctgggcctggtaggttgaagctgcaatgagccaaaattgtgccattatactctagcctgtgaggatgtgtctccaaaaaaaaaaaaaaaaa

SEQ ID NO: 2107 - DNA, 172 bp, Homo sapiens
  source 1..172: mol_type = other DNA
ctggggaggacaagatgggagagggaggaattggggcaagagaaaaaaaaactgaatgtgtgctatgctcactaccagggcattcttactccaaacctcagcatcatgcaatatacctttgtaacaaacctgcacatgtaacccctgaatctataataaaagttgaaaagaa

SEQ ID NO: 2108 - DNA, 286 bp, Homo sapiens
  source 1..286: mol_type = other DNA
gccttgtgtcttgggaggctaagtgtatacactgttcgatgggctcccttgtcttctggcttcccattggttttgaccaatagggagccccagaagatgattgaggaagggaggagacggggcttggggcatttattctctggctgcttctctgcggtcattctgcgtgctggctgccttaaagtcacatttcccacctcggtggccctctctctataggcttctcagtctctagggtacagtggtcattcttccccttggcctttcaggcataggggtggtaaca

SEQ ID NO: 2109 - DNA, 288 bp, Homo sapiens
  source 1..288: mol_type = other DNA
gtcgagtgctgtggctcacacctataatcccagcactttgggaggccaaggcaggtggattgcttgaggtcaggagttcgagaccagcctggccaacatagtgaaacctcatttttactaaaaatacaaaaattagttgggcgtggtggcatgcgcctgtattcccagctacccgggaggctgagtcaggagaattacttgaaccctgggagcggagagccgagattgtgccactgcactccagcctacttgacagagtgaaactctgtctgaaaaaagaaaaaaaaa

SEQ ID NO: 2110 - DNA, 310 bp, Homo sapiens
  source 1..310: mol_type = other DNA
gctggacccagtggctaacgcctgtaatcccagcactttgggaggccaaggcaggaggattgagcccaggagtttgagaccagcctgtgcaacatgataagactctgcctctacaaaagaattttaaaaaattagctgggtgtggtggtgtgcacctgtagtcccagctacttgggaggctgaggtgggaggtttgcttgagcccagcagtttgaggcttcagtgagctgagtttgtgccactgcattccagcctgggaaacagagtgcaaccctgtctcaaagcaaaaagagagagaaaggaaaaaaaa

SEQ ID NO: 2111 - DNA, 295 bp, Homo sapiens
  source 1..295: mol_type = other DNA
gccaggtgcagtggctcacacgggtaatcccagcactttgggagactgaggcacgtggatcatttgaggtcaggaattcaagaccagcttggccaacatggtgagaccccgtctctactaaaagtacaaaaattagctgggtgtgatggcatgtgcctgtaatcccagctacttgggaggctgaggcaggagaatctgaacctgggaggtggaggttgcagtgagccgagattgtgccactgcgctccagcctgggcaacagagtgaaactctgtttcgaaagaaagaaaagaaa

SEQ ID NO: 2112 - DNA, 51 bp, Homo sapiens
  source 1..51: mol_type = other DNA
aacccatcctttctgcttctccaggccagaagccaaggagtcctcagtgac

SEQ ID NO: 2113 - DNA, 267 bp, Homo sapiens
  source 1..267: mol_type = other DNA
ccaggcatggtggctcacgcctataatcccagcactctgggaggccgaggcgggcagatcacttgaggtcaggagtttgagaccagcctgcccaacatggcgaaccccatccctactaaaaacacaaacattcggcaggtgtggtggcacacttgggaggttgagataggagaatcgcttgaacccaggaggcggagcttccagtgagctgagatcactgcactccagcctccgcaacagagcaagactctgtctaaaaaaaaaaaa

SEQ ID NO: 2114 - DNA, 311 bp, Homo sapiens
  source 1..311: mol_type = other DNA
ggccgggcacggtggctcatgcctgtaataccagcattttgggaggcttaggtgggcaggatcacctgaggtcaggagtttgagaccagcctggccaacatggttgaaaccccatctctactaaaaatacaaaaattagccaggcgcggtggcaggcgcgtgtaatcccagctactctggaggctgaggaaggagaattgcttgaaaccaggaggcagaggttgcagtgagctgagatcgcgccactacactccagcctgagcgacagagtaagactctgtctcaaaaaaaaaataaataaataaataaaa

SEQ ID NO: 2115 - DNA, 327 bp, Homo sapiens
  source 1..327: mol_type = other DNA
atgagtcttaaaatcacaatgttgcttgaaagaagtcagccacaaaagaatgtgtatgattctgtctacatagtttcaaaaataagtaaaaccaaactatattatttaggaatacatacatggcaatacattataaagcaggacagtaatttctagggagagagagggcattgtcaggaaggaagggaccatggggggtttctggacagctggtaatattctactcagtggtatttataagtatccactttataataatttgccaagctgtccttttatactattggacttttctacataagtgttaactattttataataaaaaag

SEQ ID NO: 2116 - DNA, 267 bp, Homo sapiens; identical to SEQ ID NO: 2113
  source 1..267: mol_type = other DNA

SEQ ID NO: 2117 - DNA, 313 bp, Homo sapiens
  source 1..313: mol_type = other DNA
ggccgggcacggtggctcatgcctgtaataccagcattttgggaggcttaggtgggcaggatcacctgaggtcaggagtttgagaccagcctggccaacatggttgaaaccccatctctactaaaaatacaaaaattagccaggcgcggtggcaggcgcgtgtaatcccagctactctggaggctgaggaaggagaattgcttgaaaccaggaggcagaggttgcagtgagctgagatcgcgccactacactccagcctgagcgacagagtaagactctgtctcaaaaaaaaaataaataaataaataaaaag

SEQ ID NO: 2118 - DNA, 119 bp, Homo sapiens
  source 1..119: mol_type = other DNA
ccaagctcctattttactgtgtcagctggaaggaaacctttccctcttgggacctctttaccctctgtgacctgtggggttagaccagagagggactctggggtcacgtcttgctctga

SEQ ID NO: 2119 - DNA, 465 bp, Homo sapiens
  source 1..465: mol_type = other DNA
ggtgggtggaataacagcccccagagatgtccaggtttggaaccccaggacgtgggaaagtgttaccttgcgtggcaaaagggacccggcgcctgtgcttcagttcaggatttcgtggtggggagatgaccgtggatggttgaggtgggccctgagtaatcatgggggcccttataagggaaggggagtcacgagggtctgcgcatgaagcaaggaagcttctggctgtgaagatggcaagaaggcctggggccaggcgatgaggtggcccctggaggagctggaaaaggcattggattctgccccagagcctccgtggagaaacaaagccgcactgacaagacttcagcctggtgaaaaccattttggactcctgacctctagaactgtaagataataaattggtgtggttttcaacctctcagtttgtggtaatttgttaacagccccaataggaaacaacta

SEQ ID NO: 2120 - DNA, 141 bp, Homo sapiens
  source 1..141: mol_type = other DNA
ttccacttccggacctttctgaaatcaagacgcatctttagatcaatggcatcttactgtgtcaccggcaggcctcttctttcttagtgacgtttaaaggaaggtatcttacccctgatggcttcttggagtgaatgaaat

SEQ ID NO: 2121 - DNA, 232 bp, Homo sapiens
  source 1..232: mol_type = other DNA
taagagtccagatggtggagccaggctgtctgggttcaaatgccatctttgacacttgcaagctaaatgacattactcaaattaatcgttctgcacttcagcttccttgtctatcaaataaaaagaatagtacctgcccaatagggtcgtgaggtttcaatgagttatgtgaatgctcagggcggggcctggcacatagtaaagtacacttggtaagttttgcagttactgt

SEQ ID NO: 2122 - DNA, 63 bp, Homo sapiens
  source 1..63: mol_type = other DNA
gagaatccctgcaggtaatatttgacttttgcttcatattaatctgagtggaaaataaaaggg

SEQ ID NO: 2123 - DNA, 275 bp, Homo sapiens
  source 1..275: mol_type = other DNA
actgggcacggtggctcacgcctgtaatcccagcactttgagcggatcacacttcgagaccaacctgaccaacatggagaaaccccgtctctactaaattagccgggcgtagtggcgcatgcctgtaatcccagctactctggaggctgaggcaggagaatcgctttaacccgggaggcagaggttgtggtgagccgagatcgcgccattgcactccagcctgggcaacaagagcggaattctgtctcaaaaaaaaaaaagagagaaaagaaaaa

SEQ ID NO: 2124 - DNA, 303 bp, Homo sapiens
  source 1..303: mol_type = other DNA
ggccgggcgcagtggctcacgcctgtaatcccagcactttggcaggccaaggcaggtggaccacctgaggtcaggagttcaagaccagcctgaccaacatggagaaaccctgtctctgctaaaaatgcaaaattagctgggagtggtggcgcatgcctgtaatctcagctactcaggaggctgaggcaggagaattgcttgaatctgggaggcggaggttgcggtgaacccagatggagccactgcactccagcttgggcaacaagagtgaaattccatctcaaaaaaaaaaaaaaaaaaaaa

SEQ ID NO: 2125 - DNA, 105 bp, Homo sapiens
  source 1..105: mol_type = other DNA
gccgggtgtggtggttcatgcctgtaatccagcgctctgggaggccaggagtttgagagcagcctgggcaacatagtgagactctgtctcaaaaaaaatttaaaa

SEQ ID NO: 2126 - DNA, 615 bp, Homo sapiens
  source 1..615: mol_type = other DNA
ccagctgccccctccgggaggtgaggggcgcctctgcccggccacccctactgggaagtgaggagcccctctgcccggctaccaccccgtctgggaggtgtacccaacagctcattgagaacgggccatgatgacaatggcggttttgtggaatagaaaggggagaaaggtggggaaaagattgagaaatcggatggttgctgtgtctgtgtagaaagaagtagacatgggagacttttcattttgttctgtactaagaaaacttcttctgccttgggatcctgttgatcggtgaccttacccccaaccctgtgctctctgaaacatgtgctgtgtccactcagggttgaatggattaagggcggtgcaagatgtgctttgttaaacagatgcttgaaggcagcatgctcgttaagagtcatcaccactccctaatctcaagtacccagggacgcaaacactgcggaaggccgcagggacctctgcctaggaaaaccagagacctttgttcacttgtttatctgctgaccttccgtccactattgtcgtatgaccctgccaaatccccctctgcgagaaacacccaagaatgatcaataaaaaaaaaaaaaaaaa

SEQ ID NO: 2127 - DNA, 609 bp, Homo sapiens
  source 1..609: mol_type = other DNA
caccagaatggctaaagtgaaaaagaccgcaccgtgtggaggcgagaaagtagagcgactggacctctcttgtatttctgggggagtgtaaattggtagagacattttggaaaactggcagttttctaatgaagccgaacatatgccacctctgtgatccagcagttccactcctaggctgtcaacacccagcagaaatgtgtaggtgtgagcatcaagagggtgcatgggaatgttcagagccctttcataacagccccaaactggaaataacccatcaacagaatggaaaatgaatgatgccctactcactaccatgcacatagacacagcaacgggattgacatgcccggctacacacagcaacatagacaagtcgcatgatgaaatcttgagtgacagaagccaaatgcaacagtacatactagatggttccaggtgtattacgttcagaaccagacaaaactaatttatagtgcaccaaagtcaagatagtgatcgcccttagggttgggaggggacgaggggagagcttctgggagctgatccagttctgttgtgtaatctggtgctggttccctgggcatatgtattctgtgaaaatccatc

SEQ ID NO: 2128 - DNA, 296 bp, Homo sapiens
  source 1..296: mol_type = other DNA
ggccaggcgcggtggctcacacttgtagttccagcgttttgggaggcccacgtgggaagatcacttgagcccaggagttcaagaccagcctgagcaatatagtgagaccctgtctctaaaaacaacaaaaaaaagccaggtgtggtggcgtgcacctgtggtcccagctgttcaggaggctgaggcaggaggattgcttgaacccaggaggttgagggtgcagtgagctatgatcacaccactgcactccagtctgggtgacagagcaagaccctgtctcaaaaaagaaaaagaaa

SEQ ID NO: 2129 - DNA, 658 bp, Homo sapiens
  source 1..658: mol_type = other DNA
tgtgctagttattgattacgtcccagctcctgcgttgcctgctctgtgaaatggttctggccctttagtttttcctttaccagctggcatgatcttaagctttgtcagtagagggcgctggagagacattgcaggagacgagtttcccttcctgcttctggtgtgttctctctaggctccggcatgacgggtgacttcttccgagtctggcttctgcagcacacagggcttcgccagcacccagctcctgcagcatgggcagctcctgtgacagcaggcgcccgcagcctgcaaagcgtctccagtgccgccgcctcagtgaacctcaaccagcggcacctagcagctttctctgccaccctcttcaggtagttctgtagcagcgcgtttctcatgagacacttccctgtgagcagctttttctacccttgaggatggatttccagcaaattctgcccatgtggtaccacagccacttctctgccattcagtgaaactgccgttgtgccctcttcaaggtctggatctaagcccagggaccaggaaacctcttgcttgagtgctggaactcaggccagaaggtatggctgctgctatgtgctgtgaccagagaatcagagttctctttacttcttaccagccaacctcttgaaaatgc

SEQ ID NO: 2130 - DNA, 188 bp, Homo sapiens
  source 1..188: mol_type = other DNA
tctaggcttttctggctttgcccgcccagctgctccatgccaggaggaggaggagacacctagagcctgcgacaccatggctcgcctcgctgcaggtgggtggcagcaacggagactgcagtgcgccggagcggtaggagagcggccgcgctaggagggcaggcggctgcagccagggttgggggtca

SEQ ID NO: 2131 - DNA, 299 bp, Homo sapiens
  source 1..299: mol_type = other DNA
ctgagcgcagtggctcatacctgtaattccaacactttgggaagctgaggtgggaggatcacctgaggccaggagtccaagaccagcctaggcaacataggaagactctgtctttacgaaaaataacaatattagctgagtgtgatggtgcagacctatagtcccctctactggagaagctgaagtgggaggatgacttgagctcaggagttcaaggctgcagtgagctatgattgcaccattgcactccaccctggatgacagagcgagaccctcatctcttaaaaaaagaaaaagaa

SEQ ID NO: 2132 - DNA, 211 bp, Homo sapiens
  source 1..211: mol_type = other DNA
ggtgacggggcaaaaccccatctctattaaaaaatacaaaaatgaaattagcttgtggcacgtgcctgtggtcccagctacttgggaggctgaagtaggaggattacttgagcccagagaagtcgaggctgcggtgagccgcgatcgcaccactgcactccagcctaggcaaccacgtcagaccctgcctcaaagataaaataaaataaaa

SEQ ID NO: 2133 - DNA, 398 bp, Homo sapiens
  source 1..398: mol_type = other DNA
tgggcctgcgccggcgccgtgggcctctccgcgcctgcgccgccgccgtgggcctctccgcgcctgcgccgccgccctgggcctctccgccgctatctgcttctccgccgcgccggcgctggcgctgtgtgcctttgccagggcgaagctgcgttctcctcaacacagacccgaagagcatcgtgagcgcggagctgagttctactctgcacagacttcggagatacagcgaaggcagagcagtgttctcctcagcacaaacccggacgggcgggccggtggcaccgcgagggtggagctgcgttctgctctgcacagaccttggggacactgcctcgctttgggacaactcggggccacatcgagggtgaataaaatccttcctgtttgcagccctg

SEQ ID NO: 2134 - DNA, 304 bp, Homo sapiens
  source 1..304: mol_type = other DNA
gctggatgcagtggctcacacctgtaatctcagcactttaggaggctgaggcgggtagatcacctgaggtcaggagttcaagaccagcctggacagcatggtggaaccctctctctacaaaaataaacaaattagctgggcatgatgaccggtgcctgtaatcccggctatcctcgaggctgaggagggagaatcatttgaacctgggaggttgcagtgagccgagatcgcaccattgcactccagcctgggcaacacagcaagactccatctcacaaaaaaaaaaaaaacaaaaaaaacaaaa

SEQ ID NO: 2135 - DNA, 163 bp, Homo sapiens
  source 1..163: mol_type = other DNA
caattttacctgtcaccttgactagaccgtagtctcatctattcaatcacacagtagcctaggtgttgctcccatggcataatacaggtgttagtggagcctgccattattttttcctaagtcacgaagagtgttctagataatctagttgggactgattcaa

SEQ ID NO: 2136 - DNA, 86 bp, Homo sapiens
  source 1..86: mol_type = other DNA
atctctaatggaatcatgggggaaacgggttggaatttgtagccatggaatatatattagatgtaaagaattttctgcaataaaag

SEQ ID NO: 2137 - DNA, 299 bp, Homo sapiens
  source 1..299: mol_type = other DNA
ggccaagcatggtggctcatgcctgtaatcccagcactttgggaggccagggtggggagatcacttgaggccaggaatttgagaccagcctggccaatatggtgaaaccccgtctctactaaatatacaaaattagctgggggtggtggtgcatgcctgtaatcccagctactcgggtggctgaggcaggagaattgcttgaactggggaggcggaggttgcagtgagccaagatggcaccactgcactccagcctgggcaacagagtgaaactgtgtctccaaaaaaaaaagaaagaa

SEQ ID NO: 2138 - DNA, 296 bp, Homo sapiens
  source 1..296: mol_type = other DNA
ggtgccgtggctcatgcctgtaatctcagcactttgggaggctgaggcagcaggatccattgaagccaggagttcaagaacatcctgcacaaagaagcaagaccccatttctacaaaaagatacaaaaacattaggcaggagtggtggtgtgtgcctgtagtccagctaactcaggaggctgaagcaggaggatcacttgagcacagcagttagaggctgcagtgagctgtgttcaggccactgcactccagcttgggtgacagagcgagacctgtctcaaaaaaaaaaaaaaaaa

SEQ ID NO: 2139 - DNA, 185 bp, Homo sapiens
  source 1..185: mol_type = other DNA
aacagaaaatcaaattatggtaaatttgttcaatggaatactacacaacatttataataaataattgtctgatacatgcaacaagaaggtaaaatatctaagtatttttgctgagtaaaataaaccagacaaatgagaagatttaccatataatttcatttatataaattctggaaaataaaaac

SEQ ID NO: 2140 - DNA, 91 bp, Homo sapiens
  source 1..91: mol_type = other DNA
ggtcgggagtgggggctcacacctctaatcccagcactttcggaggccgaggtgggtggatcacaaggtcaggagttcaagaccagactgg

SEQ ID NO: 2141 - DNA, 73 bp, Homo sapiens
  source 1..73: mol_type = other DNA
tgggcaacctcagtacgtcgctccacctgtctgtgccccagcgtccttggggacagtaatagtaggacctacc

SEQ ID NO: 2142 - DNA, 771 bp, Homo sapiens
  source 1..771: mol_type = other DNA
agaacccagaattgagccacataatctatggccaagtgatctttgacaaagttaacaaaaattaaccaacgtatacaccagggaaaggtcacctcattcaataaagggcgctggggaaattggatagctatatgcacatgaattaaactggacacccaccctcaacatgtaaataattaacagaaaatagattaaaggtttaaatgtaagacctcaaactgtaaacgtattcaaataaaacaccaggacaactcttctggacactggcctaggtaaataatttacgactaagaactcaaaagcacaagccaaaaaccaaaagacaaaaagcaaataatagacaaatgggacttaatgaatctaacaagtttcttcacagcaacagagtgaacagacaaagtgcagaatgatagaaaatatttgcacactgtgcctctgacggagtactaatatgcagaattaacaagaaactcaaacaactacgaaagaaaacaagaaccaaataaccccattaaaatgagcaaacatcttgagtagacatttttgtaaataacacataaaaatggacaatagatacataaaaaatgctcagcatcactaatcatcagggaaatgcaaattaaaactgtagtgagatatcataccgttcacaatggctattattaaaaagtcaaaaataacagatgttggagaggatgaaatgtaaagtgaactcttagacactgttgatgagaatgtggacgagtacgacctctatagaaaacagtatgg

SEQ ID NO: 2143 - DNA, 293 bp, Homo sapiens
  source 1..293: mol_type = other DNA
ggagagcagaacacttgggaggtgaccaggtcttgggggccgagcccttatgaatgggatgagtgtctttataaaagaagctcaatggagttcttgtgtgccttccactatgtgaggacatggaaagaaggcaccatctatgaaccatgaaatgggctctcatcaacactgaatttgtgagcatcttgacctgagatcttacagcctcaagaagtttgaaaaaagaaatatctgttgttttttagtcacccagtttatgttgctttgttctaagagtccaaatagagcaagat

SEQ ID NO: 2144 - DNA, 88 bp, Homo sapiens
  source 1..88: mol_type = other DNA
cattccattccattccttttgattccatttgattccacttgatgattccattagattccattcgatgatgattccattagattccatt

SEQ ID NO: 2145 - DNA, 129 bp, Homo sapiens
  source 1..129: mol_type = other DNA
tgtcagtctgtcagaccccccgtgccggggagggtcctgccccttccacgaaagtgagaagcgcctgcttagagaggccgagaggaatctagacagatgagacttgctaggcttcgccactcggcgtat

SEQ ID NO: 2146 - DNA, 108 bp, Homo sapiens
  source 1..108: mol_type = other DNA
tcgtccgcccccgccgtccaggtacctagcgcgttctggcgcggaggtttaaggaccccttggggggttgtccgtccgcccatgggtcgggtgcggtgggcccgcggg

SEQ ID NO: 2147 - DNA, 2387 bp, Homo sapiens
  source 1..2387: mol_type = other DNA
ttagattccatttgatgattccatttgattccattcaatgatgattgcattcgattccattcgatgattccatttgattccattcaaagatgattccattcgattcaattcgataattccatttgatttcatcctatgattcctatggattccatttgatgatgattccattcaagtccattcaatgacgccattcaattccatttgatgatgattccattcgagtgcattcgatgattccaatcgattccattcaaagatgattccattcaagtccatccaaggactcttttcaattccattctataatgattccatttgagtccatttgatgtttcgattcgagtcctttcagtgattccatttgattccattcgatgatgattcggtttgagtccattcgatgcttcccttttcatccattttatgattccattcgagtccaactgatgattccattcaattccattctatgatgattccgcatgattccattcgatgatgattccatgtgattccattcgatgatgattccttatgattccattcgattatgattcattacgagttcattcgacgattccacatgattccattcgatgatgattccattcgaatacattcaatgatgagattcctttccattcaatgatgattccattcaaattcgttcagtgattccattcgattccattcaatgataattccattcgagtccattcgatgattccattctattccatttgatgatgattccattcgtgtctattcaatgattgtattcgagtccattccatgattccattcgattccattcgatgatgattgcatttgagtccattcaatgattccattcgattccattcgagaatgactgcattcggtaccattcgatgattccattcgattccatttgatgattccatttgattccatgcgatgatgattccatttgattccattccatgatgccgttagattgcatttgatgatgattccattcaaggccattggatgattccattcgattacattcgatgaagattccattcgagtcgattaaatgattccattcgattccattatttgataattccatttgattccattcgatgattctattcgattccattcaatgatgattccatttgatttcattctatgattacattcgatttcttttgatgatgattccatgcgtgtccattcgatgattccataagattccatttgatgaagattccattagatttcattcgatgattccattggattccattcattgatgattccatttgattccattcaatgataattccattcgattcccttcattgatgattccattggattacattcgatgatgatttaattcgactccatttgatgatgattccatttgatttcattcgatgattccattcgattccattcgatgatgattccatctggtttaatttgatgattccattcaattcctttcagtgatgatcccattcaattccatttgagtatgatttcatttgattccattgcatgatgattccattcgagtccattcgatgattccaatcgagtccattcgatgataccattcgagtccatttgatgattccattggactccattttatgattattccattcaatgtttccattcaattctattcaatgatgattccattcaatttcgttcaatgctgattcctttcaattccatttgatgattccatttgattccacttgaagattccattcgaatacaatcgacgatgattgcattcgattccatttggtgattcaattctattctattctacgatgattccatttgattccattcgatgatgactgcattcaattccattcgaagattccatctgattccatttcatgatgattctgatcgattccattcaatgattccattcgattccattcgatgattccatttgattccattcaataatgattccattcgagtccattcgatgattccattcaagcccattcgataactccatttgagtccaatggatgattcaattcgagtccattcgatcattccctttaagtccatttgatgatgattccatttgtgtccattcgatgattccatttgaatccattcgatgattcctttcgattccattagataatgattcctttcaagaccattcgatgataccattcaattaatttgatgatgattccaattcaattccattcgatgattccatcagattccatttgaggatgattccattcggttccgttcgatgacgattccatgcgattccacttgatgatgactcttttcgtttccattcgttgatgattccattcggttccattcgatgatgattcctttggattccatttgatgat

SEQ ID NO: 2148 - DNA, 1219 bp, Homo sapiens
  source 1..1219: mol_type = other DNA
aatatcacaatcctaaatatagatgcacttaacactggaactcccaaatttataaaacaattgctgatagacctaggaaatgagatagacagcaacacaataatagtgggggacgtcaatactccactgacagcactagataggtcatcaagacagaaagtcaacaaagaaacaatggatgtaaattgcaccttggaagaaatggacttaatagatacatacagaacattttatccaacaaccacagaatacacattgtattcaacagctcatggagctttctccaagatagaccatatgataggccataaaatgagcctcactaaatttaagaaaattgaaattatatcaagcactctctcagaccacagtggaataaaactggaaatcaactccaaaaggaaccttccaaaccatgcaaacacatggaaatcaaataacctgctcctgaatgagcattgggtcaaaaatgaaatctaggtggaagttaaaccatccttcgaactgaatgacaataacgacactacctatcaaaacctctgggatacagcaaaggtggtgctaagaggaaagttcatagccctaaatgcctacatcaaaaaatctgaaagaacacggacaatctaaggtcacacctcaaaaaactagagaaacaagaacaaaccaaacccaaacccagcagaagaaaggaaataatcaagatcagagcagaactaaatgaaatggaaacaaaaattacaaaagataaatgagacaaaaacctggttctttgaaaatataaataaaattgataggccattagcaagattaaccaagagaagaagagagaaaatccaaataacctcactaagaaattaaacaggagatattacaactgacaccactgaaatacaaaagatcattcaaacctactctcaacacctttatgcacattaactagaaaacctaaaagagatagataaactcctggaaaaatacaaccatcctagcttaaatgaggaagaattagataccctgaacagaccaataatgagcagcaagattgaaatggtaatttaaaaattaccaacaaaaaatgtccaggaccaggtggattcacagcagaattctaccagacattcaaagaagaattggtaccaatccttttgacactattttgactacttttgacactattccacatgatagagaaagaaggaaccctctctaattcattcta

SEQ ID NO: 2149 - DNA, 1232 bp, Homo sapiens
  source 1..1232: mol_type = other DNA
ggggggcggggggaggaagtttctcatgtgacctttctggagagatcaccagtgacaaaggtacttgtcttacttgataagttacaaaacaattaaatattactgataaaatagcattagactaggctaactgaattgactggattgtcttgatcaaaggtattacatattgatgagaatcagatccacttccagtggaaaacataagttgaccccttatgaaatagtcaccagaagagctttgctcctaataatgcatgcatgtattattgcatcttcatgcatcttctgcttctaaactctgatatgaataaatgcttcaaagccttaatgcactatgtattttcaccgagtaaaaacagcttgttgtgatatgccaattgaggagaattaaaccattcatgatctaaaacccagagactttgtcttctggaaacaacatcagggaaatactgcccttgtcactcacactgtagaaaagtttcaggacctgaaaccttgggtttataatctgacaactcagaaggtcccatcaagaaggtcccatcaagacttttggaactgtgcactcattagagaacttaaggtaaagctaaccaggaaactttctccccagaagcagataacatcctgaacataaacagccatcccaagattacaaatcaagacttctctactattatgacacttttacctcaatttttttcttgctcctgcctctataaacaatcaaactataaaatggatcttgtgtaaaagggatatacttatatttgtgaaggattttacaaccaagcttaaaagagatgactttatgccttgatatataaatgatgaagagacaaaatgggtgagaaattggaacagtatatttgttgcctcatagtcagaacattggtccacttctcttaacatatatcataggttagagagcattgccaagaggccttcactcttctggatgtgcattatttgtttggtctgtttgtatggtttgaagtaaatgaagcaatgattaaacgtttatctctcataaaactccctgaagcagattctactgtaaaggctacagttgcataacagacttctctaaattatctagctaaagttgtgctagataatatactctctctagattacttactggatgaacagaaaagaatctgtgcagttgctgacacttcttgttgcacacagatgaatacagccactattatacagacccatttgta

SEQ ID NO: 2150 - DNA, 293 bp, Homo sapiens
  source 1..293: mol_type = other DNA
ggccaggcacggcggctcacgcctataatcctagcactttgggaggctgaggcagtggattgcctgagctgaggagttcaagaccagcctgggcaacatggtgaaactccatctctactaaaatacacaaaaaattagccaggcatggtggcgagagcctgtagtcctagctactcgggaggctgaggcatgacaattgtgcttgaactcaggaggcagaggttgcagtgaactgaggtcacgtcactgaactccagcctaggcaatagctcgagactcgtctccaaaaaaaa

SEQ ID NO: 2151 - DNA, 2020 bp, Homo sapiens
  source 1..2020: mol_type = other DNA
ggggaggagccaagatggctgaataggaacagctccagtctacagctgccagcgtaagtgatgcagaagactggggatttctgcatttccaactgaggtactgggttcatctcactggagaatgtcggacaggggctgcagcacactgagtgagagccgaagcagggcaaggcatcgcctcacctgggaagcacagggggtcagggaattccctttcctagtcaaagaaaggggtgacagacggcacctggaaaattgggtcactcccaccctaatactgcacttttccaatggtcttagcaaatggcacaccaggagattatatcccgtgcatggcttggagggtcctacgcccacggagcctcattcattgctagcacagcagtctgagaccaaactgcaaggcagcaacgaggctgggggaggggcgcctgccattgccgaggcttgagtaggtaaacaaagtggctcagaagctcgaactgggtggagccaaccacagctcaaggaggcctgcctgcctctgtagactccacgtctggggcagggcatagccaaacaaaaggcagcagaaacctctgcagacttaaatgtccctgtctgagagctttgaagagagtagtggttctccagcatgcagctggagatctgagaatggacagactgcctcctcaagtgggtccttgacccccgagtagcctaactgggaggaacctcccagtaggggcagactgacacctcacatggccaggtactcctccgagacaaaacttccagaggaaaaatcaggcagcaacatttgctgtttaccaatatctgctgttctgcagcctccactgctgatacccaggcaaacagggtctggagtggacctccggcaaactccaacagacctgcagctgagggtcatgactgttagaaggaaaactaacaaacagaaaggacatccacaccaaaaacccatcagtacgtcatcatcatcaaagaccaaaggtagataaaaccacaaagatggggaaaaaacagagcagaaaaacgggaaactaaaaatcagagtgcctctcctcctccaaaggaatgcagctcctcactagcaatggaacaaagctggatggagaatgactttgacgagttgagagaagaaggcttcagatgatcaaactactccaagctaaaggaggaagttcaaacccatggcaaagaagttaaaaactttgaaaaaaattagacgaatggctaactagaataatcaatgcagagaagtccttaaaggacccgatggagctgaaaaccatggcatgagaactgtgtgacgaatgcacaagcctcagtagccaatttgatcaactggaagaaagggtatcagtgatggaagatcaaaggagtgaaatgaagtgagaagagaagtttaaagaaaaaagaataaaaagaaatgaacaaagcctccaagaaatatgggagtatgtgaaaagaccaaatctacatctgattggtgtacctgaaagtgacggggagaatggaaccaagttggaaaacactctgcacgatattatccaggagaacttccccaatctagcaaggcaggccaacattcagattcaggaaatacagagaacgccacaaagatactcctcgagaagagcaactccaagacacataattgtcacattcaccaaagttgaaatgaaggaaaaaatgttaagggcagccagagataaaggtcgggttacccacaaagggaagcacatcagactaacagctgatctctcggcagaaactctacaagccagaagagagttggggccaatattcaacattcttaaagaaaagaattttcaacccagaatttcatatccagccaaactaagcttcataagtgaaggagaaataaaatcctttacagaaaagcaaatgctgagagattttgtcaccaccaggcatgccctaaaagagctcctgaagcaagcactaaacatggaaaggaacaaccggtaccagccactgcaaaaacatgccaaat

SEQ ID NO: 2152 - DNA, 1710 bp, Homo sapiens
  source 1..1710: mol_type = other DNA
agtcacatggatggataatcctatagaagtatatgttaatgatagcgtatgggtacctggccccacagatgatcgctgccctgccaaacctgaggaagaagggatgatgataaatatttccattgggtattgttatcctcctatttgcctagtgagagcaccaggatgtttaatgcctgcagtccaaaattggttggtagaagtacctactgtcagtcccatcagtagattcacttatcacatggtaagcgggatgtcactcaggccacgggtaaattatttacaagacttttcttatcaaagatcattaaaatttagacctaaagggaaaccttgccccaaggaaattcccaaagaatcaaaaaatacagaagttttagtttgggaagaatgtgtggccaatagtgcggtgatattacaaaacaataaattcggaactattatagattgggcacctcgaggtcaattctaccacaattgctcaggacaaactcagtcatgtccaagtgcacaagtgagtccagctgttgatagcgacttaacagaaagtttagacaaacataagcataaaaaattgcagtctttctacccttgggaatggggagaaaaaggaatctctaccccaagaccaaaaataataagtcctgtttctggtcctgaacatccagaattatggaggcttactgtggcctcacaccacattagaatttggtctggaaatcaaactttagaaacaagagatcgtaagccattttatactatcgacctaaattccagtctaacggttcctttacaaagttgcgtaaagcccccttatatgctagttgtaggaaatatagttattaaaccatactcccagactataacctgtgaaaattgtagattgtttacttgcattgattcaacttttaattggcaacaccgtattctgctggtgagagcaagagagggcgtgtggatccctgtgtccatggaccgaccgtgggaggccttgccatccgtccatattttgactgaagtattaaaaggtgttttaaatagatccaaaagattcatttttactttaattgcagtgattatgggattaattgcagtcacagctacggctgctgtagcaggagttgcattgcactcttctgttcagtcagtaaactttgttaatgattggcaaaaaaattctacaagattgtggaattcacaatctagtattgatcaaaaattggcaaatcaaattaatgatcttagacaaactgtcatttggatgggagacagactcatgagcttagaacatcgtttccagttacagtgtgactggaatacgtcagatttttgtattacaccccaaatttataatgagtctgagcatcactgggacatggttagacgccatctacaaggaagagaagataatctcactttagacatttccaaattaaaagaacaaattttcgaagcatcaaaagcccatttaaatttggtgccaggcactgaggcaattgcaggagttgctgatggcctcgcaaatcttaaccctgtcacttgggttaagaccatcggaagtactacgattataaatctcatattaatccttgtgtgcctgttttgtctgttgttagtctgcaggtgtacccaacagctctgaagagacagcgaccatcgagaacgggccatgacaacgatggcggttttgtggaaaagaaaagggggaaa

SEQ ID NO: 2153 - DNA, 307 bp, Homo sapiens
  source 1..307: mol_type = other DNA
ggccgggcgcggtggttcacatctgtaatcctaacactttgggaggccaaggcgggcgggtcatgaggccagaagatcgagactatcctggctaacatggtgaaaccccgtccctactaaaaatacaaaaaaatagccgggtgtggtggcacgcgcatgtagttccagctactctggagctgaggcaggagaatcgcccgaacctgggaggcggaggttgcagtgagccgagatcgcaccattgcactccagcctgggcgacagagcaagactacgtctcaaaaaaagaagaaaagaaaagaagaga

SEQ ID NO: 2154 - DNA, 167 bp, Homo sapiens
  source 1..167: mol_type = other DNA
attctctctccttttgtctgccaccatgtgagatatgcctttcaccttctgccataattgtgagacctccccagccatgtggaactgtgagtctattaaacgtctttttttgtaaattgcccagtcttggatatgtctttatcagcagtgtgaaaacgaacgaatac

SEQ ID NO: 2155 - DNA, 7037 bp, Homo sapiens
  source 1..7037: mol_type = other DNA
aagggcttgcacttgaatttccagtttgtagctgtatggtaaaagctatggagttcgagtgggccctcacctgcagttccgtggtgacctcataaggcttagggcagcatcgggcgtagctcgatctgagctggggatttataccagcctgccaatgccaagaggagcctaagtccccacaaggggagcagccaggtgggcatttgactgatcccatcacgggaacccctccccttgtctgtctataaacactgtcataactgtttttatatcccagtgtctattgtgctgtctgctgtttgtctaagtttcctatgtcaggtcattgatactgcccaagatgactgggcaaggacttcttcaaggtcctcagtacagattttctatcccaggaggtcaaatctctcattagttgtttgggctggtcatcccagtcctgccttttctgtcagaaacaaatcaggtgttgttatggggaagggtgtgggaaacattagcctctttgggacttctggcaccataaaggttgctggcatttgaattgccataccctgtgcccaatgactggaccacctcctccttagaccagtggtggttttgaaatagctaccctgcagacctccttattcacgttttctgtcatcctgtaaattttcccatgcccttggataaggcactgtacagagaaacctaagcccatactgctttactccttctggactcctattctattcttctgtggctattctcctaccttaggaaagatctgagtggcccctttcctccatatccccatcccttaccccacacatctcattttcctgtatcacagcaagtccagcacctccaagacttggctctgctctccctcctaaaacccttaaaagaaaaggccaagtttgaactttttgccttcaagtcatggagacaccaaaaatatttgggctataagtcaaaaaagagagggggatcacataggtcccactggcctcggacccacctcttttcctctctccctagatctcaaagtgtaagaagacagaccttatgtggcaagaagtgttggctatagttgttttcctacttcttctggttataatacttcttttcttctgatactacagtcccccaggttgtgaatttctctgtcaatgctgggtttaatatttctgctcaaaccttgttaaattgcctccagaatgggaaactcttcttcccagcctcatagagattggagccctctccaatgtatgttacaaaatttctctctaggcttctcagaggattatggggtccaccttaaaaaaggcaaactctggacactctgtgaagtagaatggccacagtttggaaccgggtggcacctagaagggtcactgaatctcacagctgttcaggctgtgtggtgggtcattgctggaactcccagtcaccctgatcagtttccctacatagatcaatggctgaacttggtccagagccctcccacttggctctgctcatgcgcaatttataatcctacctccaaggtccttttgagccagacctcactgtcttcccaaccctcagctcgctcagctcctcctgtactgcctccttctgaagaagaggaaagttttcctcacccatttccactgccctataaccctcctgctcccccagaatcttccctagtctcttcaactacatcccctgtggcctctccacctgtagcctcccaattatagccttggcaggaggaggtagtccccctcctcccaatgagagaagcacaaatccctctaggtgaggagcactctgctctatttttagtttatgtccccttctctacttctgacctgtacaactggaaggctcataatccccacttctctgaaaagtcccagatcttgacctcactgatggagctcatgctctggactcaccggcccacctgggatgactgtcagcaactccttttaacccttttcacctctgaagagagggaccatatctgaagagaggccagaaagtatttccttacatcagccggtagaccagaggaggaagcccaaaacctcctagaggaggttcctccatctacccagcctaattgggatccaaactcctcgggtggaaagagagctttaaatgattttcactggtatcttcttgtgggtatcaagggagctgctcaaaaacccatgaatctgtctaagacaactgaggtggttcaggggcctgatgagtcacctggagcgtttttagaatgcctccaggaggcctttcagacttacaccccttttgacctggtggctcccaagaatagtcgggatattaatttggcattagtggctcagtcagcccctgatattaaaagaaaattacaaaagctggagggatttgctggaatgaacattagccagcttttagaagtagcccagagagtttttgacaatcgagagtttgaaaagcaaaaacaggcagctcaggcagctgaaaagcctgctgataaagcacccaaaagacaagcaaaaatcttaatggtggccatccaggaagccaaaaaggaagggcccccatcacagagcactagccaggggaccctaggtccacaccagaaaagccagaaaagcgagtgggcttccctacaaagaaaccaatgcgcttattgcaagcagattggacactggaagaaggaatgcccattaaagccagaggaaaaaccagaaaagaaaaaggtcctcaccctccccacagcggaggagtctgatgactgatgggaccagggctccctctcatttggccccccaggaacccatggtgactgctacagtggggggccagcacacacgcttcctagtagatactggggcagaacacttggtactgcacacacccttgagcagtgtctctaataaaaaggtggctgtacaaggggctactggagctattcaggaatatcctgtcacacactcacaagaagtgagtttgggacagaaaagagtaaccctctcatttcttgtagtcccagagtgccccattccccttctcagacaagacctgctccataagctacaggcatctatctctttctcaggccaacaagctcacctcacgttaggggacacaatgccccctactgcccgactcctgtttactacccctctgttggaggaatatctctttgtttcaccctcacaactgctgaagaatgaagctaatcctctcctattggatctacagactctctttccttgagtttggtctgagtcaaacccccaggactagcaaagcatcatccactggtagttgtagaactcctggccactgccctgccattccaggtaaaacaatatcctgtgagtcagtgggctgagaggggatcaatctccatattcagtgactgttacaagctggtatactcacaccatgtcagtccacctggaatactccatttttgccagtccagaaacccataacaaatgattaccaggcagtacaggacttgcaggaagttaacaagtggacagttactgtccatccgactgtccctagcccttatactttactcagcctgctcctgccagaacatacagtatacactgtccttgacttaaaggatgccctctttgctattcctctggcccccaaaagccaacctatctttgcttttgaatggacagatcctggcttgggagacaccacctaattaacctgggctcggttaccccagggttttaaaaattcccccacactttgtagagaagccctccaacaagatctcataccgttccatgccagtcaccctaactgcactcttctccagtatgtggatgaccttttactagctactgaaactactgacagctgcctgcaacatactagggacctgctttgccttccccaggaactcaggtaccgggtctcagctaagaaggcccagctttgtctccccaggatttcctacctggggtatgtgatagacaagagaaaaagggcactcgccagtgcctgaaaggaaaccatcctgtggatccccattcccaccaccaagagacaggtatgtgaattcctggtggccatgggatagtgttgtctacggatatcaggtttcatggaaattggcaagcccctatactccactagtggaggaaatggcccactagtttggactgacacagaggaggaggcgtttcaaaaccttaagaaagcattaactgaggcccctgctctagccctccaaatatctaaaagccattttacctttttgttcatgaaagccagggagtcactaaaggggtactcactcaaactttggggccatggtgatacccagtggcctatttgtctaagagactggaccctgtggcctctgggtggccaagttgtctgtgagccatagcagccacagcaagcctggttcaagaggctgataaactgactctaggtcaaaatttaacccttatggctcctcatgccatagagacattgttaagaagtgcttctggcaaatggatgttgaacgctcgcatcctgcagtatcacaatttactgttagatcagcctcgtttaactttctctcccacaaggtgtttaaatccaggtaccttgttccctgattcagaccttaccccacctatccatgactgccaggaactgttagtgactatggaaactggccgacctgatctccaagatgtgcctttaaaggaggtggatgccaccatagttacagatggtagcaacttccttgaacaaggagtacgaaaggctggtgcaaccgttactacagcaacagacatagtgtgggcccaggtgctgccagcaggcaccttagcatagagggctgaattagttgtcctcactcaagccctctgatggggtaagaacaaacgcgttaatatctacactgacagcaggtatacttttgctactgtgcatgtacacagagccatctatcaggagtgtgggctactcacctcagcaggaaaaactatcaaaaataaagaagaaattttggccttgcttgaagctgtttggctccctcaacaagtggctgtaattcactgcaaaggacatcaaaaagaagacacggccgttgctcgtggtaaccaaagagcagactctgcagctaaagaggcagctcagtacccagtcacacctttgaccctgctgcccgctatatcctttctgcagcctgacttgccgggccacccagaatactccccaaaggagaaaaaacaggcttcggatcttcaggccagtaaaaatcaggaaggttggtggattcttcctgattccagaatcttcatgccccgagtcctcggggaaactttaatcagtcgtctgcattctaccacccatttgcaaggagcaaaactggcccagcttctaaggagccatttcaagataccccacctttggacttaactaaccaagcagctctccggtgtacagcttgtgctcaggtaaataccaggccaggtcctaaaccagcccaggccactgcctctggggagacttaccaggagaaaggtgggaaattgactttacagagataaaaccacaccgggcagagtataaatagctcctggtgctagtagacaccttttctggatggactgaagcatttgccaccaaaaacgagactgccaccatggtagttaagcttttactcaatgaaatcatccctcgacatgggctgcctgctgccatagggtctgataatggactggccttcacctcgtccacagctcagtcagtcagtaagacattaaacattcaatggaaactccattgtgcctattgaccccagagctctgggcagatagaacacatgaatcgcaccctaaaaagtactcttacaaaattaatcctagagactggtgagaattgggtaaagctccttcctctagcccttcttaaagtaagatgtaccccttaccaggctgggttttcaccttttgaaatcatgtatgggagggctctgcctgtcttgcccaaactaagggatacccatttagcagaaatctcacaagctaatttgttacagtatctgcagtctctccaacaggtataagacatcatccagccacttgtccagggagcacatcccaatccagttcctgaccagacagggatctgccactctttccagctgggtgacctggtatatgttaaaaagttccagaaggaaggactcactcctgcctggaaaggacctcatactgttatcctcaccatgccaaaagctctgaaagtagacagcattcctgcttggattcatcaccctcacatcaagaagaccaacaaagcccagcaagaaacatgggtccccaagcctgggacaggccccttaaaactgtgtctaagtcgactgaagccattaaattaattctttacctcttttgtttgtttcagcctgtcatgccttctgctccttcctactcttttctccttacttctttcacgacaggacgtgtgtttgcaaacaccacctggaaggcggggacctccaaggaagtctcttttgcagttgatttatgtgctctgttcccagagcctgcccataccctcgaagagcaacacaatctgctgatcataggagcaggaaacatcaactttgctgcagggtttggatactcctaaagccagacttgatgtggaagctccaaaggtgcagaaaaaggactccaaaatgctgacttttacctctgtcctggaaatcaccctggctctagttgtcgagattcttaccagtttttctgccctgactggatacgtgcaactttggccacctactgtgggagatcagcccgatcttcaaccctttccatacctcgtgcttcccatcctaaactgtactaggggaaattgcaatcttcttactataaccatccataaccctaatttagctcaatggtattacagcatgtcatgggtattaagactttatatcctaggatttgatgttggaattacgttcaccatccagaagaaaatcctggtctcatggagccctcctaagccaatagggtctttaactgattcaggtg

SEQ ID NO: 2156 - DNA, 65 bp, Homo sapiens
  source 1..65: mol_type = other DNA
tctagattgtagatcttcagataaattctgccattttcatttcacttcctgaaagtcagggtcgg

SEQ ID NO: 2157 - DNA, 289 bp, Homo sapiens
  source 1..289: mol_type = other DNA
gccgggcgcagtggctcacgcctgtaatcccagcactttgggaggccaaggtgggtggatcacctgaggtcaggagctcgagaccagcctggccaacatggtgaaaccccatctctactaaaaatacaaaaattagccaggtgtgatggtgcatgcctgtaatcccagctcctcagtaggctgagacaggagcatcacttgaacgtgggaggcagaggttgcagtgagccgagattgcaccaccgcactccagcctgggtgacagagcgagacttatctcataaataaa

SEQ ID NO: 2158 - DNA, 227 bp, Homo sapiens
  source 1..227: mol_type = other DNA
cgccggccagcagctgcctccccgctcccctgaggagagctcaggtcctgcggcccgccatgcccgagccccacagtgggctcccgcgcggcccgagcaccccgacgggcgccgcctcctgctccgcggcgccccgtcccatcgaccgcccgagggccgaggagtgcggacgcgcggcgcgggaccggcaggcagctccgcccgcggccccggcgcgggatccactg

SEQ ID NO: 2159 - DNA, 254 bp, Homo sapiens
  source 1..254: mol_type = other DNA
tacaatatagtgatcgggtactctgacttggtagcacagtaagacagacttgccttaaactcctaattcaaccacttacaaagtcattgtttgaacttggctcttgtttaacctctgtaaacctcagttttcttgtttattcagtggggctaatacttgagttactgtaaacattaaatgggatgatgtatgtgaagtgcttagcttggtgcctagcacagagtaagtggtcaatatgtggtagttgtcattat

SEQ ID NO: 2160 - DNA, 154 bp, Homo sapiens
  source 1..154: mol_type = other DNA
gactcaattcaggctatgtatgactatgaagtcaggctcatctgcttactggctgtgtgaactttttgtatcttggttttcttcatccatgaaatccaagtaatactacctaattgttactgtggagattaagttcaaatgcaatgtatagtaa

SEQ ID NO: 2161 - DNA, 202 bp, Homo sapiens
  source 1..202: mol_type = other DNA
agtgttgtccaataggactttcttcgatgatgaaaatgttccatatctgtaccgtccaatacagcagtcactagccacatgaggctgttaagcacttgaaatgtggccagggcgactgaagagctgcatttttaattaaaattaaaactgaatttaaattgaagtagccacagctagctagtggctaccatattggacagca

SEQ ID NO: 2162 - DNA, 217 bp, Homo sapiens
  source 1..217: mol_type = other DNA
agacaagagagagtagggtttaaaacctgagctttaagactcccactagcttcgtgtcctttggcatgttaacgtgcctcagtttcctcatctgtataatggggatatatgaaaggcaccagtcctaaggtgaacattaagtgagatgattctagttacagacttagaacaatttccagcacatagttaaatatccaggaaattctggtactgttat

SEQ ID NO: 2163 - DNA, 123 bp, Homo sapiens
  source 1..123: mol_type = other DNA
accttggattcattccctggtgtctttgagcctcagtttcctcattggtaaaagagaagtgaagcagtgtctcacagggtcattacagagattaaatgaaataaatgaaataacatagaccag

SEQ ID NO: 2164 - DNA, 140 bp, Homo sapiens
  source 1..140: mol_type = other DNA
aaagtcacagatggggcaccctcgggccatccagcccagtgttttctttagcccctatgatgttcattttttgttatatcccattaggtgcccatatttaaaaattgggagatttcacataaaattaaaaggtctgcatt

SEQ ID NO: 2165 - DNA, 306 bp, Homo sapiens
  source 1..306: mol_type = other DNA
ggcttggcgcggtggctcacgcctgtaatcccagcgctttgggagaccgaggtgggtggatcacgaggttgagatcgagaccatcctggccaatgtggtgaaaccccatctctgctaaaaatacaaaaattagctgggcgtggtggcacgtgcctgtagtcccagctacttgggaggctgaggcaggagaattacttgaacctgggaggcagaggttgcagtgagctgagatcgtgccactgcactctagcctggtgacagagtgagactgtgtctcaaaaaaaaaaaaaaagaaaagaaaaaaga

SEQ ID NO: 2166 - DNA, 189 bp, Homo sapiens
  source 1..189: mol_type = other DNA
aggtctgcatttttctttagaactcagaacacccaatagtcctaggcccccatcctcgcatggcagcaagctaaataagcatcttcccactgcgagttggggcatgacccagcctatggtttgccatactccctctttttctccgttttttcattaattgtgaacctgacctgcatcaccctttcatgt

SEQ ID NO: 2167 - DNA, 319 bp, Homo sapiens
  source 1..319: mol_type = other DNA
aacatggatgcatcttaaagactttatgctaagtgaaaccagtcacaaaaggacaaatactgtatgattccacttacatgagaaatatgagtagtgaagttgatgatagagacaaaaggtatggctgttgctaggggaaggggaggtggggagttattgttcaatgggcacagaatttgggaagatggaaaacttctggagatggatgatggtgatggctggacaacaatgagaatgtacttaatccactgaattgcatatttaaaaatgggtaagctggtcagttttatgttataaatattttacctcaataaaaaca

SEQ ID NO: 2168 - DNA, 199 bp, Homo sapiens
  source 1..199: mol_type = other DNA
aaggacatttcctgcagcactatttatttatagcagtgaaaacagctggaagaaacttagatgttcgtcagcagtagggagtatgtgctaaggaatattaagcagctcaaagaatgaatacttggactgatatggaaggatatctgtcgtcttaccaagtgacaaaaggcaagaacaatatagaatgtcttttatcttt

SEQ ID NO: 2169 - DNA, 302 bp, Homo sapiens
  source 1..302: mol_type = other DNA
aggcgcggtgggtcacccctgtaatcccaacactttgggaggccaaggtgggcggatcacttgaggtctggagttcaacaccagcctggccaacatggtgaaaccccgtctctattaaaaacacaaaaattacccaggcgtggtggtgcgtgcctgtagtcccagctactcaggaggctgaggcatgcgaatcacttgaacttgggaggtggagcttgcagtaagccgagatcgcaccaccgcactccagcctgggtgatggagtaaaactctgcctcaaaacaaacaaacaaacaaacaaa

SEQ ID NO: 2170 - DNA, 44 bp, Homo sapiens
  source 1..44: mol_type = other DNA
tacctggactcctttgtggcatcaggcagactatagatacatta

SEQ ID NO: 2171 - DNA, 298 bp, Homo sapiens
  source 1..298: mol_type = other DNA
ggccaggcacggcgactcacgcctgtaatcccagcactttgggaagccaaggtgggcagatcatttgaggccaggaattcgagaccagtctggccaacacagtgaaaccctatctctaaacaaacaaacaaaattactgggcatagtggcacacacctgtaatcccagctactcgggaggctgaggcatgagaatcacttgaacccgggaggtggaggttacgatgagccaagatcacaccactgcactccagcctgtgtgacagagcgagaccctgtctcaaaaaaaaaaaaaaaaa

SEQ ID NO: 2172 - DNA, 233 bp, Homo sapiens
  source 1..233: mol_type = other DNA
tccttcccatcttcaaggtcaagattgaacgctgactcctgcaggaagtcttccaggattcccaggcaggaatgatggctccctgtccctgtagctccaggagttcttgcttcacgcacgcctcacataccagactgaatgttggcaggaggagtgaccaggtcggtcatctgtgtccctaccacctacaacaggccagcaatctacccgtgtgtgtttgttggacagaatta

SEQ ID NO: 2173 - DNA, 163 bp, Homo sapiens
  source 1..163: mol_type = other DNA
atagaagcacaggaaaaagctcagaaggaaatgacccaaaatgcttacgccagtttgctaggtgattacaacagctgatttttatttttcttcttgattctcttctacagtttccaaattctctacaatgaacatgtacttctttttaatatcaaaagacaaa

SEQ ID NO: 2174 - DNA, 1019 bp, Homo sapiens
  source 1..1019: mol_type = other DNA
ttatcataattttagaatgtactcctacttaacaacaagaacaaaaagttaactgtaaaataaccttaggcaggtccttcaggagatatttcagaagaaggcagtgttgtcataggagatgacagcgccatgtgcgttattgctcttgcagaccttccagtgggacagcatgtggaggtggagactgtgattgatgttaatgatcctgaccctgtgcgggcctgggctcatgtgtgtgtttgtgtcttagtttttaacaaaaaagtttaaaaagttaaaaaaagaaataggaaaaaccttatggaataaagatatatagaaagaaaatatttttgtgcagttgaacattgtgttttaagctaagtgttattacaaaatagtctaaaagtttttaaaatttttaaagtttataaagtaaaaaagttccagtaagccaaggttaatttattattgatgaaagaaaaatatttttaataaatttagtgtagtctggccaggcacagtggctcatgcctgtaatcccagcactaactaaataactaaagcacagtggctcatgcctgtaatcccagcactaactaaataactaaataaaataaatgtattgtagcataagtgtattgtgtttacaaagtgttcagtaatgtcctaggccttcacattcactcaccactcactcactgactcaacccagagcaacttccagtcctgcatgctccactcatggccagtgccctatccagttgtgtcactttttatcgtttatacagtactgtaccttttctatgtttagacacacaaatacgtaccattatgttacagttgcctacagtattcagtacagtagtatgctgtacagattgtagcctaggggcaataggctataccatatggcccgggtgtgtaggatgttgtactgtctaagtctgtgtaagtacactctgatattcacacagccatggaactgcctaatgaggcatttctcagaacgtaatcccatccttaagcaatgcatgact

SEQ ID NO: 2175 - DNA, 710 bp, Homo sapiens
  source 1..710: mol_type = other DNA
agtcagaaaggcaattattaaaaagtcaagaaacaacagatgctggcgaaactgcagagaaataggaacgcttttaccctgttggtgggaatgtaaattaattcaacaactgtggatggcagtgtggcaattcctcaaggatctagaaccagaaatatttgacccagcaatcccattacggggtatatatttgggtatatacccaaaggaatataaatcattatattataaagatacatgcacatgtatgtttattgcagccctattcacaatagcaaagacttggaaccaacccaaatgcccatcaatgatagactggataaagaaaatgtggtacatatacagcatggaatactatgtagccataaaaagcaatgagatcatgttctttgcagtgacatagataaagctggaagccatcatcctcagcaaactaacacaggaacagaaaaccaaacacctctatattctcactcataagtgggagatgaacaatgagaatacatggacacagggaggggaacaacacacactggggcctgtcgatgaggcaggggagggaaagcgtcaggactaatagctaatgcatgctgggcttaatacttacataatgggttgataggtacagcaaaccaccatggcacatgtttacctatgtaacaaacctgcatgttctgcacatgtatcccggaacctaaaataaaataaaa

SEQ ID NO: 2176 - DNA, 359 bp, Homo sapiens
  source 1..359: mol_type = other DNA
ctatacagccataaaaaaagaacaaaatcatgtcttttgtgggaacatggatgggacgggggccattaccctttgcaaactaatgcaggaacagaaactcaaacattgcatgttctcacttataagtggaagctaaatgatgagaattcatgaacataaagaagggaacaaaaggcactggggtctatttgagggggaagggtaggagaaagaagaggaacagaaaagataactcttgggtaccaggcttaatacctgagtgatgaaataatccatacaacaaccccccatgacacaagtttacttatgtaacaaacctgtacacttacccccgaacctaaaataaaagttaaaaaaaa

SEQ ID NO: 2177 - DNA, 214 bp, Homo sapiens
  source 1..214: mol_type = other DNA
ttatttcatgtcttaaatatttgctcctgctgttccctctgcctggattgctgttcctcaccttgagcatttgacttatgtatatactacaagactaaactcatacctactggcttatccactaagtctttcttgaccaactgcctcataccttggtttatgtgactctgctgaattatctcagccccctaagtcccccatcaaagaacttttc

SEQ ID NO: 2178 - DNA, 133 bp, Homo sapiens
  source 1..133: mol_type = other DNA
aggcatgatggcccatacttgtaatcccagctattgggaaggatgagatgggaggatggcttgaggccagaggtttgagaccgaccagccagggcaacacagtgagaccccttctcaaaaaaaaaaaaaaaaa

SEQ ID NO: 2179 - DNA, 168 bp, Homo sapiens; identical to SEQ ID NO: 1980
  source 1..168: mol_type = other DNA

SEQ ID NO: 2180 - DNA, 77 bp, Homo sapiens
  source 1..77: mol_type = other DNA
ttgtcattactgttttaattgtctggcttctctctggactgggagctcagtgaggattctgaccagtgacttacaca

SEQ ID NO: 2181 - DNA, 97 bp, Homo sapiens
  source 1..97: mol_type = other DNA
gaaaaacgggttcaaaccccacttctgccacctaccagctatatggccttgaatgagtcattcagctttaataaggttcattttcttctgtttaaaa

SEQ ID NO: 2182 - DNA, 281 bp, Homo sapiens
  source 1..281: mol_type = other DNA
gctgggcacagtggctcgcgcctgtaatcccagcactttgggaggccaaggcggacggatcacttgaggttaggagtttgagaccagcctggccaacatggtgaaaccccatctctactaaaaaaaaaaaaaaaattaggtgtggtgacacatggctgtggtcctagttacttgggaggctgaggcaggagaatggcttgaactggggaagcagagcttgcagtgagccaagatggtgccattgcactccagcctgggcgtgacagagtgagactccatct

SEQ ID NO: 2183 - DNA, 309 bp, Homo sapiens
  source 1..309: mol_type = other DNA
ccaggcgcggtggctcatgcctgtaatcccagcactttgggaggccgagttgggtggatcacgaggtcaggagatcgagaccatcctggctaacacggtgaaaccccgtctctactaaaaatacaaaacattagccgggcgtgatggcgggcgcctgtagtcccagctactcgggaggctgaggcaggagaatggcgtgagcccgggagacggaggtcgcagtgagccgagatcacgccactgcactccagcctgggtgacagagcgagactctgtctcaaaaaaaaaaaaaaaagaaaaagaaagaaa

SEQ ID NO: 2184 - DNA, 125 bp, Homo sapiens
  source 1..125: mol_type = other DNA
gctaggtgtggtggctcaggcctgtaatcctggcactttgggaggccaaggtgggaagatcgcttgaggccaagagttcaagaccagcctgggcaacatagcgagacccctatctgtattaaaaa

SEQ ID NO: 2185 - DNA, 303 bp, Homo sapiens
  source 1..303: mol_type = other DNA
gctgggtgcagtggctcacacctgtaaccccagcactttgggaggacgaggcaggtggatcacttgaggtcaggagttcaagaccagtctggccagctcgatgaaactccgtctctactaaaaatataaaaattagcagagcacagtggcacctgcctgtaatcccagctactcaggagggtgaagcatgagaactgcttgaacctgggaggcggaggttgcagtgagccgagattgtgccactgccctccagcttggacaatagagcaagatttcgtctcaaaaaaaaagagaaaaagaaaa

SEQ ID NO: 2186 - DNA, 311 bp, Homo sapiens
  source 1..311: mol_type = other DNA
ctgggcatggtggctcactcctgtaaccccagcactgtgggaggctgaggctggtgaatcgcctgagtccaggagtttgagaccagcctgggcaacaaggtgaaaccctgtttctatcaaaaaaaaaaaaaaaaaaaaaaaaggaaaaaaaataagtcaggcatggtggtatgcacctgtagtcccagctacttgaaggctgaggcaggaggatcgcttgtgcctgggaggttgaagctacagtgagctatggtcaagctactgcactccattataggcaaccctatctcaaaaaagcaaagcaaaacaaa

SEQ ID NO: 2187 - DNA, 294 bp, Homo sapiens
  source 1..294: mol_type = other DNA
gccaggtgtggtggctcatgatagtaatcacagtactttgggaggccaaggcaggaggatcacttgaggtcaggagttcaagaccagcatggccaacacaatgaaaatccatctctactaaaaatacaaaaattagccaggctaatggcacactcctgtaataccagctacttaggaggctgaggcaggagaatcgcttgaacctgggaggcagaggttgcagtgagccgagatcatgccactgcactccaggctggacaacagagcaagactccgcatcaaaaaaaaaaaaaa

SEQ ID NO: 2188 - DNA, 294 bp, Homo sapiens
  source 1..294: mol_type = other DNA
gccgggcgtggtggctcatgcctataatcccagcacgttgggaggctgaggcgggcggatcggttgagctcaggcgttcgggaccagcctggccaacatgatgaaaccccgtctctaccaaaaatagaaaaaaatatagccgggcctggtggcgcacgcctgtagtcccagctactcgggaggctgaggtaggaggatcgcttgagcctgggtagaggctgctgtgagctgaaatggcgccactgcactccagcctgggtaacagagcgagaccccgactcaataaataaataa

SEQ ID NO: 2189 - DNA, 257 bp, Homo sapiens
  source 1..257: mol_type = other DNA
cattgggaggccaaagggggtggatgacctgtggtcaggagttcgagaccagcctggccaacatggtgaaaccccgtctctactaaaaatacaaaaattagctgggtgtggtggcacacccctgtaattccagctactcgggaggttgaggtgggtgaacttgggaggcggaggttgcagtgagccaagatcgcgccactgcactccagcctgggtgacagagcaagactccatctcaaaaaaaaaaaaaaaaaaaa

SEQ ID NO: 2190 - DNA, 64 bp, Homo sapiens
  source 1..64: mol_type = other DNA
cggtcattgagctcagccgacagggcaaagagggtcagcatccgaaactgttggtttttagttt

SEQ ID NO: 2191 - DNA, 399 bp, Homo sapiens
  source 1..399: mol_type = other DNA
tctcctttacgggactctcctcttccctcccacctgatgcgcatcagcagccacgggcctggcccttgaatcttgtctaactgcactcgctgcctggtggcctcatcccaccccaagaccactgcactgatggctccaaccccaacttctccctgcactcagcttatgaatacgacggccctcattgcatccatgcagagacctcagaggcagctcagctcagtgctcagcgtggcactcggggcttcacacttcccccgtgtcctgtctgagaaaactgtgacaccatcaacccaactgctcagaccaaacacccagctgccgcccttagtatctctttttcccctcggtggccatatccaggccgtcagcagtgagtcctgtggtcagtcttcaaaa

SEQ ID NO: 2192 - DNA, 345 bp, Homo sapiens
  source 1..345: mol_type = other DNA
gctatgctccaaatgtctatgtctcccccaaattcctctgttcaaatcttaacccccaagataaggtattgagaggtgattagatcattagggtggagccctcattaaaggttttagggatcttataaaaagaggtttaagggagctagtttgccccttccaccactgaggacacagcaagaaggtgacatctatgaaccacaaagtgggtcctcaccagacaccgaatctgctggtgtcttgatcctggccttccagcctccagaactgtgagcgctacatttctgtagtctaagccacccaggttatggtattttgttacggcagtccaaattgactaagaca

SEQ ID NO: 2193 - DNA, 467 bp, Homo sapiens
  source 1..467: mol_type = other DNA
attttttttttcaatacactgttctgggtcaattggatatccatatgaaaaaaaggacccctacctcacaccacacacacaccacacactcaattccagatgagctgcagatctaaaacaaaagggcaaaaccaaaaggcttttagaggaaaacatctttgtgaccttgcagtaggcaaaaatctctcaagcaggacacaaatagcactaacaatttaaaaatggataaactggactattttaaaactaagaacttctggtcattaaaagacccccattaagacaataaaaaggtacccaatagaaggagagaagatatccgatgaggaactttatctgcaatactaaaaagttctataaattggtaagaagaagacagataatccagtagaaaaatgggcaaacgatttaaaaaggtccttcatgaaagggaatattctaacggtctttaaaggtatgaaaaggta

SEQ ID NO: 2194 - DNA, 633 bp, Homo sapiens
  source 1..633: mol_type = other DNA
tggtgatgggttataacccatagaataaaagaaatatttatgagtccatattgatataaattaaaaattgaatatataaataaatgggggagaagggacagatctttttatggtagaatctcaattaataaatgtaggagaaatgacagaaatagaaagtcacctattttaacaagcaagaatcatcagtggatgccaaaattagagagcaaaagtacaaggagaaacaggacattttcatcctctcaaaagtatcccctcacaggatattttattaattaaaaagggagaaataatgactctccagtggagaaacttggcacacgccaccttaactaaggatcaaggtgaacatcagcagtcacacgacgcagtgacattgtgcagcatttaggatgcactgacatggggacaaccgcacttctgtggtactcttgccaaaactgtatggcttctaattctgaatgaaaaggcatcagacaaagccagatttagaggcatcctacaaaacatctgaccgatattcttcaaaagtatcaaagtcatgaaaaacaaagagggacaggtgtgagaaactgtcacgagctgcagaaactgaggtgacaccaacacgaaacactatgtagggtccta

SEQ ID NO: 2195 - DNA, 257 bp, Homo sapiens
  source 1..257: mol_type = other DNA
aacatccaaaaatagctttgttttgtaccaacaggaattagaaaatataatgaaaagatttcgttcccagcagcatcaagaaaagtagattttctagaaataaacagttatggaggacttgtatggagaaatttaagtcttcactgagggccactttacaaaggaaatttgaataaatggagagagagagaagccttgttgttggataggaaaacccgtactaaagatactctacctacattaatttatttgtttaa

SEQ ID NO: 2196 - DNA, 210 bp, Homo sapiens
  source 1..210: mol_type = other DNA
tgatgcatggagctacaacagccatcttaggtccccgaggtgcccagcatcacgtaaaacatcgatatgctaagaagaacaaaaagagcccaatctctgatgttattgagctcctgcatgaactctggacctgcctgcctcagacttctgtgaaagaataaaatttctttttgcctaagtcactgttagttgggttttctgttcttcagc

SEQ ID NO: 2197 - DNA, 38 bp, Homo sapiens
  source 1..38: mol_type = other DNA
gcgcaaccgtgggcaagttactgctcctctttaaacct

SEQ ID NO: 2198 - DNA, 288 bp, Homo sapiens
  source 1..288: mol_type = other DNA
cgcggtggctcacgcctataatcccagcacctgggaggctgaggagggcagatcacgaggtcaggagatcgagaccatcttggctaacacggtgaaactgcgcctctataaaaatacaaaaaattagctgggcatggtggcgggcgcctgtagtcccagctactcaggaggctgaagcaggaaaatggcatgaacccaggaggtggagcttgcagtgagccgagatcgcgccactgcactccagcctgggtgacaagagtgactcggtctcaaaaaaaaaaaaaaaaa

SEQ ID NO: 2199 - DNA, 1282 bp, Homo sapiens
  source 1..1282: mol_type = other DNA
caggtttactttgttttattaccctcctctgcacttcacagatattgtgttggtttttttttttttttaacaaattgatggtttgtggcaaccctgggtgagcaagtctgtggtgctcactttgtgtcacattttgttaattctctcaatattttaaacttttcagtctattacggtgttctgtggtcagtgatctttgatgttactattgtaattgttttgggatgctatgaactatgctcatataagatggctaacttaaattatcaatgttgtgtgtattctgactgcttgagcaagtgggcattcccccatctctgttgctctcttcaggcctccctgttccctaagaccatatggatgttagacacaacaatatcgaagttagaccaatttataacccaacaatagcctctaaaaagtgttcaagtgaaaaaaagagtcacatatctctcgctgtaaataaaaaactagaaatgattaagcttagtgaggaaggcatgtaaaaagtgaagataggtcaaaagctagacctcttgcactaaacacttagtcaagtgggagtgcaaaggaaaaattcttgaaggaaattaaaaatgctactccagtgaagtagtgaaagtgaaacagcctcattgctgataatggagacagttttggtggtctgaatagatcaaattagccacaacattcccttaaaccaaagcctaatccagggcaaagccctaactcttcaattctgtgaaggccaagagaggcaaggaagttggagaagaaaaatttaaagcttacagcggttagttcatgaggtttaaggaaagaagccatctacataacataaaagtgcaaggtgaagcagcaagtgttgatggtaaagctgcagcaagttacccagaatatctagctaagataattgatgaaagtgactacgctaaacaacagattttgaatgtagaggaaacagccttctattggaagaagatgccatctgcgactttaatagccagaaaggagaagttaatgctttgcttcagagcttcaaagtacaggctgattctcttgttagggtcagctggtaattttgagttgaagccagtgctcacttaccgtgccaaaaatcctggggcccttaagaattatgctaaatctactttgcctgttctctacaaatggaataacaaaacctacatgacagcatatctgctttcagcatggtttactgaatattttaagccgacttttgagacctactgctcagaaaaaaagattcctttcaaaatat

SEQ ID NO: 2200 - DNA, 779 bp, Homo sapiens
  source 1..779: mol_type = other DNA
taccatagctaaaatttaaagctccaagaacaggtttaactgagataagaaacagctaagggaaactatgtgaattaaaagatatatctgaagaaatgtgtaatggaatgttgtaacaaatatatggaaaatgtcaaagtgattaaggaacatgggaaatgaaatgaaaaaatctaaattatgactaatcaaaatttaggagaagagacaaagaatggagtagggataatggctgacaacttttctgaaaggcactaatctacaaattcaagaatctcaatcgaatcataagaaggagaaataaagaaattaactgccaggaacatcactgtgaaactataaaacagtaagatcaaggagaagattttaaaaacagccaaggggaaaaaaaaatcaggttatcatcaaagaaacagctgttagactgacagccaatttcttgacacaaacagtagaagctgataaactatgggattatatcctcaatgtactgagaaaaaacaactgtcaaccagaattcatcaaaagtattttatgaaaacaagaagagaaaaaagacatttttagatattagtaatggagacaatttgatactagccaatctttgctaaagaaaattcagaaaatatatactttaggcaaaagagagtaatttcaagtggaagatctgaaatgtaagaatgaatgagacatagacaaaatggtaaaatggtgtataaatctaaagaaaattgtgcaagacgatactagtaaaatattgtgttgttaaaaacaagtag

SEQ ID NO: 2201 - DNA, 45 bp, Homo sapiens
  source 1..45: mol_type = other DNA
tcctctccactagactttggttcctagagggcgtggggccgggtc

SEQ ID NO: 2202 - DNA, 259 bp, Homo sapiens
  source 1..259: mol_type = other DNA
aggccaaggtgggtggaccacatgtggtcaggagttcgaaaccagcgtggccaacatgatgaaatcctgtctctactaaaaataagaaaaaattatccaggcatggtggtgcatgcccgtaatcccaactacttgggaggctgaggcaggagaactgcttgaacctaggaggcagaagttgcagtgagccgagattgcgccactgcactccagcctgggcaacgagtgaaactgtgtctcaaaagaaaaaaaaaaaaaa

SEQ ID NO: 2203 - DNA, 285 bp, Homo sapiens
  source 1..285: mol_type = other DNA
tgactcatgtctgtaatcccagcactgtggaaggccaaggcaggcagatcacctgagctcaggagttcaagactggtctggccaacatggtgaaaccccatctctactaaaaatacaaaaaattacctgggcgtggtggcacacacctgtagtcccagctactcgggagactgaggcacgagaatcacttgaacccaggaggtggaggctgcagtgatctgagattacagcagtgcactgcagcctgggcaacagagcgagactctgtctcaaaaaaacaaaaaa

SEQ ID NO: 2204 - DNA, 304 bp, Homo sapiens
  source 1..304: mol_type = other DNA
gctgggcatggtggctcacgcctgcaatcccagcactctgggaggccaaggtgggcggatcacttgaggtcaggagttcaagaccagcctggccaattggcgaaaccccatctctactaaaagtacaaaattagccggctgtggtggcacatgcctgtaattccagctacttgggaggctgaagcaagagaattgcttgagcccaggaggcagaggttgcagtgagtggagatcatgccactgcactccagcctggtgacagagcgagactcctcaaaaaaaaaaaaacaaaaaaacaaaaaaa

SEQ ID NO: 2205 - DNA, 123 bp, Homo sapiens
  source 1..123: mol_type = other DNA
gccaggcatggtggcgtgtgcccacagtcccagctactcaggaggctagggtaggaggatgtcttaagcccaggagttcatgtccagcctgggcaacatagtgagaccttgtctctgaaaaaa

SEQ ID NO: 2206 - DNA, 395 bp, Homo sapiens
  source 1..395: mol_type = other DNA
gggaaaacgttattttcatagctgcttttagaaatgtaaattgtaacagcctccttggacaacattgtgagtctgttttaacattaatatactcttacaacctaggaatctcctgggaatctatccctaaggaataaaaagcgccagcacttaagattatatgtttactaatgtatattgtattttttggtaaggaccaaaaaaacaaacaaaaaaaagaccatcagtaagggaatggatgaataaattgtggtaaaaacataccatggctgaatggtatttccttgaaaagaatgtgtgggaacaaactccaaacttctctaggtcaaatgaggaaagcaagaggggagagagagagtgtatgtgtgtgtgtagcagtttttataaaataaaga

SEQ ID NO: 2207 - DNA, 300 bp, Homo sapiens
  source 1..300: mol_type = other DNA
gccaagcatgatggctcatgtctatagtcccatcacgttgggaggccgaggcgggtggatcacttgaagtcaggagtttgagaccagcctgtccaacataatcaaaccctgtctctactaaaaatacaaaaattagctgggccttgtggcgggtgccagtaatcctagctactcagcggccaaggcaggacaatcacttgaacccaggaaacggaggctgcagtgagctgagaccatgccactgcactccagccttggagacagagcaagactccatttcaaaaaaaaaagaaaaaaaaa

SEQ ID NO: 2208 - DNA, 154 bp, Homo sapiens
  source 1..154: mol_type = other DNA
gctggactggcctgcccaggccagcatcctctttacaccctcactgcttcttgtgtccttcccaaagctgcccgccccactctgatgggcacccttttccttagtcaagggaaacgccagccgctgggcttcccgctagccttccaaataaact

SEQ ID NO: 2209 - DNA, 309 bp, Homo sapiens
  source 1..309: mol_type = other DNA
ggccaggcttggtggctcaggcctgtaatcccagcactttgggaagcccaggcaggcagatcacttgaggtcaggagttcaagaccagcctggccaacctggtgaaaccctgtctctactaaaaatgcaaaaactagccgggcatggtggcgcacacctgtaatcctagctactcgggaggctgaggcaggagaattgcttgaacccaggaggcggaggtagtggtgagcaaagatcgtaccgctgcactccagcctgggtgatagagcaagaccctatctcaaaaaaaaaaaaaaaaaaaaaaaaaga

SEQ ID NO: 2210 - DNA, 68 bp, Homo sapiens
  source 1..68: mol_type = other DNA
acaacctccactttttcatcttcagccctgaccactccctggggcccatagccttacatccatctgcc

SEQ ID NO: 2211 - DNA, 308 bp, Homo sapiens
  source 1..308: mol_type = other DNA
gttgggcgcagtggctcacgcctgtaatcccaacactttgggaggcccaggcaagcagatcatgaggtcaggagatggagaccatcctggccaacatggtgaaaccgtctctaataaaacacaaaaaattagccagacatggtggcatgcatctgtaatcccagctactcaaaaggctgaggcagaggaatcacttgaacctggaaggcagaggttgcagtgagccaagactgcgccactgcactccaacctgggcgaaagagcgagactcaagtctcaaaaaaaaaaaaaaaaaaaaaaaaaaaaaa

SEQ ID NO: 2212 - DNA, 305 bp, Homo sapiens
  source 1..305: mol_type = other DNA
gctgggaatggtgactcatgtctgtagtcccagcactttgggaggccaaggtgggaggactgcttgaggttagcagtttgagaccagcctggccaaaacagtgagactctgatctctacaaaaaaatgtgtaaaaccttaaccaggcatggtggtacgcacctgtcgtcctagctactcaggaggctgaggtgggaggatcacttgagtttgaggcttccgtgagttacgatcaccctactgcactccagcttaggtgacagagcaagaacctgtctcaaaagaaaaaagaaaaaaagaaacaaa

SEQ ID NO: 2213 - DNA, 486 bp, Homo sapiens
  source 1..486: mol_type = other DNA
aaatagaaaacaggaaccaacccatatccattaggatggctactgctgaaaaaaaaacagaaaataacaaacgctaaagaggatgtggagaaactgaaactcctgcgcactgtgggcgggcatgtaaactgggatagccactgtggaaactggtatagcagttcctcaaaaaattaaaaatgaaattaccatatgatccaacaattccacttccggctatattttcataagaattaaatgcagggttttgaagagatatttgaacacccatgttcacggcatattattcacaataattaaaacatggaagcaacccaagagtccaacagacaatggatcagcacaatgtggtatatacatacaatggaatactattcagccttaaaatggaaggaaattctggcatatgctacaacatggatgaaatgtgaggacattctgaatgaaataagccagtcaaaaaacatatatatagggttcaacata

SEQ ID NO: 2214 - DNA, 832 bp, Homo sapiens
  source 1..832: mol_type = other DNA
tttaaaaaaaagtgggcaaaagacatcaacagccacttctcaaaagatatacaagtggccaaaaaacatgaaaaaatgctcaacatcactaatcatcagagaaatgcaaatcaaaaccacaatgagatatcacctcacatcagtgagaatggctattactaaaaagtcaaaaaaacacagatgctgggggaggttgtgagaaaagagaatgcttatacactgttgtgggaatgtcaattagttcacccactgtggaaagcagtctggagagttctcaaagagcttaaaacagctaccactagatccagcaatcccattactgggtatatagccaaaagaaaataaaccgttttacaaaaagaaaaacatgcactcataagttctttgtagctctattcacaatagcaaagatatggaatcaacctaagtgtctatcagtaatggattggataaagaaaatatgtacatatacaccatggaatactaaacagccataaaaaaggacgaaattatgtcctttgcagcaacatggatgcagctggaagccattatcctaagtgaattaacgcagcaacagaaagccaaatatggcatattctcacttataagtgggagctaaacactggatactcacagacataaagatggcaacaaaagacattggggactaatagacggtagaaggagggtaagggctgaaaaaccattaggtactatgctcacttacctgcatgatgggatcaacagtaccccaaacctcagtgtcatccaatgtacccatgtaagaaacctgcacattacttatatccaaaatctgaaataaaatttgaaa

SEQ ID NO: 2215 - DNA, 333 bp, Homo sapiens
  source 1..333: mol_type = other DNA
gcctttgcatatgctgttccctctctgcaacacccttccttgccttgcctgcttggtgaactctggctcattctgcaaaacactgctccaatgacaccttttctttgaaacctcctctgacccttgggtgaatggtggttctccatccgatttcctgatgcttttattcacacctctgtcatagcacttggcgcctgcttgaattgttagtttaagagtctgttgtttccagtggcatgtgagcccccgggggcagggacaatgttttatctcatctttgtattcccgatgctccgcacagggcctgggatggtgcagctatttaatgaaagt

SEQ ID NO: 2216 - DNA, 295 bp, Homo sapiens
  source 1..295: mol_type = other DNA
ggctgggcgcggtggctcacgcctgtaatcccagtactttgggaggccgaggcgggcggatcatgaggtcaggagatcgagaccatcctggctaacacggtgaaaccccgtctctactaaaaatacaaaaaattagccgggcgtggtggtgggcacctgtggtcccagctactcaaaaggctgaggcctgagaatggcgtgaaccccgtggggcggagcctgcagtgagccgagatcgcgccactgcactccagcctgggcgacagcgagactccgtctcaaaaaaaaaaaaaaa

SEQ ID NO: 2217 - DNA, 486 bp, Homo sapiens
  source 1..486: mol_type = other DNA
gtgaaaggaaaataaatctccggaccccaaaatcactcagccaagagaaaaatcaagctgggaattaggcaaacctgcctcccgttttatttctaaataacatagttacaatgataagaagctacacgcctccctcataattagcgtccagggaaattccttgtggacaaaggacagacggaactggaagtcatccctctggggctcccctgagacaaacgcttatatgattgccccgttcccttactgtttacataaaaatgcggattcactgggccagactcaatcgtgtattcagtggaaggctgactgaaccaatgtacgccatacacatactgatcttgtgtctccctaagatgtataaaggcaaactgtatccccagccacctcaggcacctgttgtcaggacctcctgaggctgtcacaggtgcatccttaaccttggcaaaataaactgagactggtctcagatatttggggttcaca

SEQ ID NO: 2218 - DNA, 184 bp, Homo sapiens
  source 1..184: mol_type = other DNA
aggcaaagaggtgtggcgggggagcgtaagatttggagtcagaagtctcagttctgtcatttgtcctggagcaggttattgagtctctttgaatcttggttttcacatctgtaaaatggaaagtcctgcttgtttcatgggatgggtgtgggaataaacaataaatgtcaaacgtgtggcagac

SEQ ID NO: 2219 - DNA, 3217 bp, Homo sapiens
  source 1..3217: mol_type = other DNA
tacaagccactagcccgcctcttagaacctctcatttcctttccatcgtggaaatctatcctcaaggaaataacttctcagtgttccatctgctattctactactcctcagggattattcaggccccttcccttccctacacatcaagcttgaagatttgcccccacccaggactggcaaattagcttcactcaacatgccccgagtcagataactaaaatacctcttagtctaagtagacactttcactagataagtagaggcctttcctacagggtctgagaaggccaccgcagtcatttcttcccttctgtcagacataattcctcagtttagccttcccacctctatacagtctgataacggaccagcctttactagtcaaatcacccaagcagtttctcaggctcttagtattcagtggaaccttcatatcccttacagtcctcaatcttcaggaaaggtagaacggactaatggtcttttaaaggtacacatcaccaagctcagcctccaacttaaaaaggattggacagtacttttacttcttgctcttctcagaattagagcctgttctcgagatgctacagggtaggtacagtccatttgaacttttatatggacgcactttcttgcttggccccaacctcatcccagacaccagccctctaggcgactgtcttccagtcctccagcaggctagacaggaaattcgccaggctgctaagcttctcttgcctactccagatccccagccatatgaagacaccctagctggacgatcagttcttgttaatctgactcctcaaactctacaacctcgatggaccggaccctacttagtcatctatagtaccccgactgctgtccgcctgcaggatcctccccactaggctcaccgttccagaataaagctgtgtccatcggacagccagcctaatccctcctcttcctcctggaagttgcaagtactctcccctacttcccttaaactcagtcgtatttcgaagaacagtcataacccttatgagcctaatacatcccttcattctattaggtttttcgtccttaccctactttttgcaacagggctttacgaagtcacccccaccacttaggccgagccccaaaaaactagtcatccctactatcttctgtctggtcatactcctattctccattctcaactacttataaatgccctactcttgtttacacggccggtttacactgtttcttcaagccatcacagctgatatctcttggtgctatccccaaactgccactcttaactccctcttagagtggatagatgatctttgctggcaaggcaccctccaatatttccaccctgatgaagttctattctttacttttatactcactcttattctcattcccattcttatgccaccctctacctctccccagctatctccaccacactatcaaccttacccattctctcctagccgcttctaatccctccttagtgaacaactgctggctttgcatttccctttcttccagtgcctacacagctgtccccaccttacagacagactgggcaacatctcccatctccctacacctccgaacttcctgtaacagccctcacctttaccctcctgaagaactcatttactttctagacaggtccagcaagacttccccagacatttcacatcagcaagctgccgccctccttcacacttatttaaaaaacctttctcctttctcctttctccccccatattcggacctctcacaacacaaactactatgcctgtggccgctcctatatgtatctctcggcaaagacccactggaattcccctaggtaatctttcaccttctcgatgttcctttactcttcatctccaaagtccaactacacacatcactcaaacaatgggagccttccagctccatattacagacaagcccgctatcaatactgacaaacttaaaaacattagcagtaattattgcttaggaagacacttgccctgtatttcactccatccttggctactttccccttgctcatcagactcttcctcccaggccctcctcttgtttacttttacccagccccgaaaataatagtgaaaggttgcttgtagatactcaacgttttctcatacaccatgaaaatcgaacctccccctctatgcagttaccccatcagtccccattacaacctctgacagctgccgccctagctggatccctaggactctaggtacaagacaccccttgcagcactcctcatctttttactttacatctccagttttgcctcgcacaaggtctcttcttcctctgtggatcctttacctaacatgtgtctacctgctaattggacaggcacatgcacactagtcttccttactcccaaaattcaatttgcaaataggaacgaagagctccctgttcccctcatgacaccgacacaacaaagaagagtcattccactaattcccttgatggtcggtttaggactttctgcctccactattgctctcggtactggaatagcaggcatttcaacctctgtcatgaccttccgtagcctgtctaatgacttctctgctagcatcacagacatgtcacaaactttatcagtcctccaggcccaagttgactctttagctgcagttgtcctccaaaaccaccgaggccttgcttactcactgttgaaaaaagaggactctgcatattcttaaatgaagagtgttgtttttacctaaatcaatctggcctgatgtatgacaacataaaaaaactcaagcatagagcccaaaaacttgccaaccaagcaagtaattacgctgaacccccttacgcactctctaattggatgtcctaggtcctcccaattcttagtcctttaatacccatttttctccttcttttatttggaccttggatcttctgtttagtttctcaattcatccaaaactgtatccagaccatcaccaatcattctatacaacaaatgtttcttctaacatccccacaatatcaccccttaccacaagacctcccttcagcttaatctctcccactctaggttcccacgccgcccctaatcccgcttgaagcagccctgagaaacatcgcccattctgtctccataccaccccccaaaaattttcaccgccccaatacttcaacactattttatttttcttattaacataagaaggcagga

SEQ ID NO: 2220 - DNA, 156 bp, Homo sapiens
  source 1..156: mol_type = other DNA
ggctgatgggaggcaagatctggattcaggaatcctcaattttagctctcgctctgtcaccaaaaccctccgtccctcccagagcctcgaggagtttccccttgtgtaaaccggtatcgcgtcccttccagctctgacatcctgcggttctagaat

SEQ ID NO: 2221 - DNA, 279 bp, Homo sapiens
  source 1..279: mol_type = other DNA
gccgggcgcgatggctcacacttgtaatcccagcactttgagaggccgagatgggcagatcatctgaggtcaggggttcaagaccatcctgcccaacatgatgaaacctggtctctactaaaaatacaaaaattaaccgggtgtggtggcgcatgcctgtaatcccagctactcaggagactgaggcggaattgccagaaccctggagggcagaggttgcagtaagctgagatcgggccactgcactccagcctgggtgacagaatgagactcagtctc

SEQ ID NO: 2222 - DNA, 43 bp, Homo sapiens
  source 1..43: mol_type = other DNA
gaatgtgagcccagcggaggcaggaactttggtctctctcatt

SEQ ID NO: 2223 - DNA, 191 bp, Homo sapiens
  source 1..191: mol_type = other DNA
attttaagtgaaaaccacaggttataaaacaatacaaatagtataatccactttataagtttttaaacaaatatacttatgcatagagaaaatctggaaaaatatatgccagctataaagtggttcttgctcatgggataaattgtgggagactttttccctttttgcttctctgtgttgtgatttcctaa

SEQ ID NO: 2224 - DNA, 217 bp, Homo sapiens
  source 1..217: mol_type = other DNA
agtggctgagagtaagtgtaccgatctaaaggtcagcagacactaagttctggctttaccatttaataactgattagccacatgatcataaaaaaatctctctctcaaactcactttcttgaaccagaaaatgggagtaacgctctacctgcttcaatcttgttacataaattaaaaacttttgtcaacgtgggctgtgaactgaggtactgcataa

SEQ ID NO: 2225 - DNA, 281 bp, Homo sapiens
  source 1..281: mol_type = other DNA
gaaaggggcaggagagaggagaccctctccctggtcatggagcattgtggtgtaagggtgtctttactgtcactgctgctgccatggtgcaagcctgaagggtgcagagctttagccaccatagtgaaaatgggtcctgggtgatactgttgagctctagattaattagccgtttaaccactcgactcccaaacttcttggaatgtgaaataatcatttctcttcttggcttaggccatttttgtttgatttttctgttgcttgcagtcaaatcatcctga

SEQ ID NO: 2226 - DNA, 86 bp, Homo sapiens
  source 1..86: mol_type = other DNA
gggatattgctgatgtcgatgtaaacctggagggggatggacaggactggggtcagctccagggctctgggctccacccagctctg

SEQ ID NO: 2227 - DNA, 397 bp, Homo sapiens
  source 1..397: mol_type = other DNA
tgatacagtttagatctgtatccccacccaaatctcatgtttaattgtaatccccaatgtgggaggtggggcctggtgcaaggtgactggaccacgcaggtagtttctcatgaatgatttagcactgtccccctactgctgtctcgtgatagagttctcatgagatttggttgcataaaaagtgtgtagcacctcccctctctcttttcctcttgctctagccctgtgaagatacctgctctggctttgccttttgccatgagtaaaagctccctgagacctccccagtcatacttcctgtacagcccatggaaccatgagccaattaaaccttttttctttataagttacccagtctcaggcatttctttatagcagtgtgagattgaaccgatac

SEQ ID NO: 2228 - DNA, 125 bp, Homo sapiens
  source 1..125: mol_type = other DNA
ttgcagccttagtcacacaactgagtcatctcaagtactctttaaggacacacagcccaggctgttctgagtcagaataggcccctacaggtatattttaaaactcttcgtaattctaatgtgta

SEQ ID NO: 2229 - DNA, 124 bp, Homo sapiens
  source 1..124: mol_type = other DNA
agtggaaagagcactggacggacaaatcttgtccccaccgctgacaagcagtgggagtccatgtgatagcctgacctctttgagcttctgctcccacatcagtgaaatgaagacagtggggcct

SEQ ID NO: 2230 - DNA, 267 bp, Homo sapiens
  source 1..267: mol_type = other DNA
cagaggcccccagaatctctaggtgtggctgattggtgaacagaattcccccgtacaaacccaatccataaagactgagagagaaggctattttttttcaaatgcgtacaactcaacaaaaaaaatatcacaagccacacaataaagcagggaaatataaccaaatcaaaggaacaaaataaatctctagaaactgcctccgaagagatggagatctataaactatcggattaataattcaaaataattgtcttaaagaaacacagt

SEQ ID NO: 2231 - DNA, 296 bp, Homo sapiens
  source 1..296: mol_type = other DNA
gccgggcgtggtggctcatgcctgtaatcccagcactttgggaggccgaggtgggaggattgcttgagtccaggaatttgagaccagcctggacaacacagtgagacctcatctctatcaaaaaataaaaattagctagatgtggtggcatgagcctgtgttcccagctgcttaggaggctgaagcaggaggattgattgagcctgcgaggccaaggctgcagcaggctgtgattgcaccactgcacttcagcttgggcaacagagcaagaccctgtctccgaaacaaataaaaaa

SEQ ID NO: 2232 - DNA, 145 bp, Homo sapiens
  source 1..145: mol_type = other DNA
agggctgctgggcatggttgtgcaatttgtgtactgttcaaaggcatctgcttagagagttgagtgggcctggcagggttgtagcaacccagaggaaggggtgccgttttgcaattttgcctttttatattcacacaaaggtgcc

SEQ ID NO: 2233 - DNA, 333 bp, Homo sapiens
  source 1..333: mol_type = other DNA
cagtcccctggcatgtcagtgggtctctgtgactgagtctggccagtggaacataagtagaaataatgtgcaccacttctaggcctggcccctaaaacctcgggcagggtcctccacacgccttctcctctcccgactgctggcagattcagggcaatttgggagccatatgctgaagaggagcatccaccagcctgagtctctaacaaccacctgctgatggcccccaactcacaccagatgcgacatgaggcagcaatcaactttaactgtcttaagtggctattttggaatttatctgtaaccacagttagcattaactataactaatac

SEQ ID NO: 2234 - DNA, 281 bp, Homo sapiens
  source 1..281: mol_type = other DNA
ggccagacatggggtctcaagcctgtaatcccagcactttgggaggctgaggcggccagatcacttgaggtcaggagttcgagaccagcctgaccaacatggtgaaattgcatctctactaaaaatacaaaattagccaggagtgacggcacatgcctgtaatcccagctacttgggaggccaaggcaggagaatagcttaaacccaggaagcggagcttgcaatgagccaagatcgcaccactgcactctagcctgggcaacaagagtaaagctccaact

SEQ ID NO: 2235 - DNA, 888 bp, Homo sapiens
  source 1..888: mol_type = other DNA
accaggcatacaaatagataataccaaatgatgaaaagccaagagaaaaaatagacaatagaaacagacacggaagattcagatattgatattattagacatagaccctaaaacaactgagattaatgctgtcaacaaaataagtgacaaggtagagaatttcagcagaaaaccacaatgtataaaaaagaatctgttagagattttatgacttaaaaataaaatacctgaattaaagactcaataaagtttagctgtagcttaaacagtttaagagaggcttaaagaactgaagacaagtcagtataaatatctgaactgaagcacagagaaaaaggataggaaatagagaaaaggacataagaaacatatgggatggaataaaaaaatctcatgtgtaattggagtccccaaaaggggagaaaaagagcagaagtgatattggaagggataatgatcaagaatttccaaaactgataaaagatgtcaagcccagattcaagaaacaataagaaccccaagtgagataagtacaaagaaaaccacccagacacatgaggttaaaactgctggaaatgaaagagaaagcatcctaaaagcacccaaaagaaaaaagatacctcaatgtccaaggaggaagagcaaaactgacatctttcttctcaagaagaatgatggaagccctgaagacaatgcagtggcatctgcaaaatgctgaaagaaaacacctgctttcctttacctcatgaaaatatgcttcaaagtgctgtacctggtgaaaatacccttcaaaggtgaacacaaaagaaagatgctttgagtccaacaaaaccagatgttttttcctaggatacttgcagtgaaaagactatttaaaggagttctgca

SEQ ID NO: 2236 - DNA, 602 bp, Homo sapiens
  source 1..602: mol_type = other DNA
ttgaattagtagttaagaccctccaaaagataccagacccagatgatttcacttgtgaattctatcaaatacttaaggaagaaataataccaattctacacaatctcttcaaaaaatggaagaggagagaataattcccaactcattccaggatcccaacattatcctgataccaaaactagacataaacattacaggaaatctacatgccaatttctcatgaatacacaatctattaacctataaaagtataatacatcatgatcaagtgaggttcatcccaggaacacaaggctggttcaacatttgtaaactgatgtaattcgtcacattaactaactgaacaagaaaaaccatatgatcaaatcaacagatgaagaaaaagcattacacaaaattccacaatcaagatagtttttataggtggtaactctcaacaaactaggaagagaagggaacctcttttacctagcaaaggatatgtataaaaaaccaacagctgacatcatacttaatggtgaaagacctgaacattccccccgtaaaatcatgaacaaggcaaggatgtcctttctcatctgtcctatttaaaactgtactgg

SEQ ID NO: 2237 - DNA, 160 bp, Homo sapiens
  source 1..160: mol_type = other DNA
ctgggtgtggtagctcgtggctgtaatcccagcactttaggaagccaaggcagtaggatcgtttgagcccaggagttcgaggctgcagtgagctatgagcataccactgcactccagcctgtgtgaaagagccagaccctgtctcaaaaaaatgataaaa

SEQ ID NO: 2238 - DNA, 280 bp, Homo sapiens
  source 1..280: mol_type = other DNA
gccaggtgcggtggctcacgcctataatcccagcactttgggacgctgaggtgggtggatcgcctgaggtcaggagtttgagacatggtgaaaccccatctctactaaaaatacaaaaattagcctggcgtggtggtgcatgcctgtagtcccagctacttgggaggctgcggcacgagaactgcttgaacccaggaggtggaggttgcagtgagccgagactgtgccactcactccagcctgggcaacaaactccatctcaaaaaaaaaaaaaaaaaga

SEQ ID NO: 2239 - DNA, 248 bp, Homo sapiens
  source 1..248: mol_type = other DNA
agctgggtctggtccccaccagcttctccatggcctgtgagctaagaataggtttcacgtttttaaatagttaaaaaaaaaatctaagtttcttgacacagaacaatatatgtcattcagatttctgtgtctaaaagttgtactagacacagccacatctctgtactatttatggcagagaccatacagcccacagagccaacagtgtttactccctggctgtctatgaaaacatctgcccaccgctg

SEQ ID NO: 2240 - DNA, 308 bp, Homo sapiens
  source 1..308: mol_type = other DNA
gggcgcagtggctcacgcctgtaatcccagcactttgggaggccgaggtgggcggatcacgaggtagggagatcaagaccatcctggctaacacggtgaaaccccgtctctactaaaaatacaaaaaaaaaaaacaaaaaaaaactagccaggcatggtggcaggcacctgtagtcccagctactcgggaggcagaggcaggagaatggcgtgaacctgggaggtggagcttgcagtgagccaagatcgtgccactgcactccagcctgggtgacagagtgagactccgtctcaaaaaaaaaaagaaa

SEQ ID NO: 2241 - DNA, 242 bp, Homo sapiens
  source 1..242: mol_type = other DNA
ggcctggtgtggtggctcacacctgtaatcccaacactttgggagcccgaggcgggtggatcagctgaggtcaggagttcaagaccagcctggccaacctggtgaaatgcagtgtcaactaaaaataggaaaatcagccaggcgtggtggcagacccctgtaatcccagctactcaagaggctgaggtaggagaatcacttgaacttgggaggggtaggttgcagtgagctgagatcacacc

SEQ ID NO: 2242 - DNA, 209 bp, Homo sapiens
  source 1..209: mol_type = other DNA
cagtaagtcttcatttaacattgttaatagaacaatgaaaactccaacttttacgtgaaacagtgtatagccagtcctcaaataactgccttttgttcaacatcctttccttgtaacaactgatgagaaaaagtatggttttgttatacatcatttctcttgaagtacaagttttcaagaacctattgacaaggttaagtgtgggctta

SEQ ID NO: 2243 - DNA, 213 bp, Homo sapiens
  source 1..213: mol_type = other DNA
aaataaataccatactctggagtccgaaagggccatattccaactctggcaccaccacctcacagctgtgtgaccgggagtagtcacttaacctatgtctccccttcctcaccagtaaatcctgctacatcatgtactgtgacaaggattcagtaaggtcatatgtggacagtagctggcacagaggggctactaaacaaatggctgctatta

SEQ ID NO: 2244 - DNA, 305 bp, Homo sapiens
  source 1..305: mol_type = other DNA
gccgggtgtggtggctcacacctgtaatctcggcactttggggggctgagacaggcggatcacctgaggccaggaattcaagaccagcctggccaacatggtgaaaccctatctccactaaaaatacaaaattagctgggtgtggtggcgcatgcctgtaatcccagctacttgggagactgaggcaagagaatcacttgaacccgggaggtggaggtggcagtgagccgagattgcgccattgcactccagcctgggcaaaaagagtgagactctgtctcaaaaaaaaaacaaaacaaaaaaaa

SEQ ID NO: 2245 - DNA, 224 bp, Homo sapiens
  source 1..224: mol_type = other DNA
tggtgtagtgaagggggaggcggtgtgggacagggtcagctcctggccttgctaccttcctgctggtccagcgcccttaagcaagttgctctctctgaaccttagtttcctcatttgtaaaatagggacagtgatacctactccacaccattgttgagacagttggagacagtatacataaagggcctgtgtgaggccggtgctccatgagtggtagctcttat

SEQ ID NO: 2246 - DNA, 123 bp, Homo sapiens
  source 1..123: mol_type = other DNA
tggctcacatcagtaatcccagcactttgggaggctgaggtgggtggatcacatgaggccaggagttcgagagagtctggccaacatggtgaaaccccatctctatcaaaaatacaaaaatta

SEQ ID NO: 2247 - DNA, 308 bp, Homo sapiens
  source 1..308: mol_type = other DNA
gccaggcacagtggttcacgcctgtaatcccagcactttgggaggccaaggcaggcggatcacttgaggtcaggagttcgacaccagcctggccaacatggcaaaaccccgcctctactaaaaatacaaaaattagccaggcgtggtggcacgcacctgtaatcacagctacttaggaggctgaggtggcagaattgtttgaacccaggaggtggaggttgcagtgagccgagatcacaccactgcactcaagccttggcatcagagtgagactctgtctcagtaaaaaaaaaataaataaataaaaa

SEQ ID NO: 2248 - DNA, 164 bp, Homo sapiens
  source 1..164: mol_type = other DNA
gagacagtcctgtggtgaaaaccacactgacggggacttaggagactcggtctcggctttgccactacacagctgacgggccttggcggtaacctttgtgccttttatctttctcctttgtaggaaaagagggttagataagttattactctgtttcaactcta

SEQ ID NO: 2249 - DNA, 293 bp, Homo sapiens
  source 1..293: mol_type = other DNA
ggcccagtgtggtggctcacacctgtaatcccagcactttgggaggccaaggtgggtgttatcacttgagttcaggagtttgagaccagcctggccaatatggcaaaaccccatctctactaaaaatataaaaattagctgggcatggtggtacatgcctacagtgccagctactcaggaggctgaggcaggagaattgcttgaacccgggaggtggaggttgcagtgagctgagatggcaccactacactccagcctgggtaacagagcaagactctgtctcaaaaaaaaaa

SEQ ID NO: 2250 - DNA, 299 bp, Homo sapiens
  source 1..299: mol_type = other DNA
gccgggtgtggtgcctcacgcctgtaatcccagcactttgggaggctgaggcaggtggatcaccagaggtcaggagttcaagacaagcctggccaacatggtgaaaccccgttctactaaaaatacaaaaattagctgggcatgctggtgcatgcctgtaatcccagctactcgggaggctgaggcaggagaatcgcttgaacccaggaggcggaggttgcaatgaaccgagatcgcgccactgtactccagcctgggcgacagagcaagactgtctcaaaaaaaaaaaaaaaaaaaaa

SEQ ID NO: 2251 - DNA, 403 bp, Homo sapiens
  source 1..403: mol_type = other DNA
agagaggaatgcctcttccccactcctggtttacacaaggaaaaactttctctaaacacactcctggctcctctgtacttctttaaagagattaagtataacttatcttttaatcttatttgactggcaaatcatggaagaatgaagtgcaacttggctcagagttctgtgtttctaccctttctgaacaagtgttctccatttcttcagggccaggctctctcctgcgttgaaaagcttgatttggtataggactgcttagaactgcgggctggggatgtctatctgatagacttcagttaacagatacaatttggctcacatactgaaaaccagatcttccaacctggtttcttttaataattttggtctccagctgccactcctgttttctccatttgtc

SEQ ID NO: 2252 - DNA, 324 bp, Homo sapiens
  source 1..324: mol_type = other DNA
aaacatggccagactcccttgctttttgctgtgtagttccctctgcctgggatgcccttccccctttctctgcctggcaacatcttacttgtcctttgaggccccaactcaagtgtcacctccttccccagctcccccaggcagaaatagttgtctgtgcttccttggttcatgcttctactgtgacacttatctcactgttttataattagtcgggcatgagtctgtttcccaagctagactgtgtctgaatcatgtctgtatccccagtgcccggtgcagggcctggcatagagtaggtactccataaaaggtgtgttgaat

SEQ ID NO: 2253 - DNA, 294 bp, Homo sapiens
  source 1..294: mol_type = other DNA
ccgggcgctgtggcttatgcctgtaatctcagcaatttgggaggccgaggcgggcggatcacctgaggtcagaagttcgagaccagcctgtccaacatggtgaaaccccgtctccactaaaaacacaaaaattatctgggcgtggtggcatgtgcctgtagtcccagctactggggaggctgaggcaggagaatcgcttgaatccaggaggtggaggttgcagtgagtggagatggcgccactgcgctccagcccgggtgacagagtgaaactccatctcagaaaacaaacaaa

SEQ ID NO: 2254 - DNA, 274 bp, Homo sapiens
  source 1..274: mol_type = other DNA
ggccggcacggtggctcacgcctgtaatcccagcactgagaggccgatcacttgaggtcaggagttcaagaccagcctggccaacatggtgaaaccccatctctactaaaaaatacaaaaattagccaggcatggtggcacacacctgtaatcgtagctgaggcaggagaatcgcctgaacccaggaggcggagcttgcagtgagccgagatcgtgccactgcactccagcctgggcgacagagtgagactccatctcaaaaaaaaaaaaaaaa

SEQ ID NO: 2255 - DNA, 296 bp, Homo sapiens
  source 1..296: mol_type = other DNA
ggccaggtgcggtggctcacacctgtaatcccagcattttgggaggccaaggtgggtggatcacttgaggccaggagttcaagaccagcctggccaacatgatgagacctccgtctctactaaaatacataaattagccgggtgtggtggcaggcgcctgaaatcccagctactcaagaggctgaggcaggagaatcgcttgaacctgggaggcaaaggttgcagtgaactgagattgcgccaccgcactccagcctgggcgacagagcgagactccatctttaaaaaaaaacaag

SEQ ID NO: 2256 - DNA, 112 bp, Homo sapiens
  source 1..112: mol_type = other DNA
tcaccagcccactttgtgacccagcaagacctttcccctctctgggcatcagtttctcatctgtaagatgaccagagttgcttagatgatctcctagatcctttccagttct

SEQ ID NO: 2257 - DNA, 154 bp, Homo sapiens
  source 1..154: mol_type = other DNA
gagcatggtggcacgtgcctgtggtctcagctacttgggaggctgaggcgggaggatcgccagagcccaggagtttgaggctgcagtgagctatgagggtgcctctgtgctccatcctaggcaacagagtgatacgctgtttaaaaaggaaaaa

SEQ ID NO: 2258 - DNA, 318 bp, Homo sapiens
  source 1..318: mol_type = other DNA
ggccgggcttggtggcttatgcctgtaaccccagcactttgggaggccgaggtgggcggatcacctgaagtcaggagttcgggaccagcctggcaaacaccccatctctactaagcgaaaacccatctctactaaaattacaaaaattagctgggcatggttgcgcatgcctgtaatcccagctactttggaggctgaggtggggagaattgcttgaacctgggaggtggaggttgcagtgagccaaggtcgcgacactgcactccagcctgggtgacagagtgagactccatctcaacagaaggaaaaaaaaggaaa

SEQ ID NO: 2259 - DNA, 154 bp, Homo sapiens
  source 1..154: mol_type = other DNA
ttcctggcttacagctcttataacccatgtaatttcctaagggactagagcaataatagtatgttttgttaaaatatttgaccttttgtccttggtttctgaaacagctccagaacagctccagagtgataaaggtgaaagacagtcttttgtt

SEQ ID NO: 2260 - DNA, 406 bp, Homo sapiens
  source 1..406: mol_type = other DNA
tgtcaggcccctgagcccaagctaagccatcataaccctgtgacctgcacatatacatccagatggcctgaagcaactgaagaaccataaacgtgaaatagccagttcctgccttaactgatgacattccaccattgtgatttgttcctgctccaccctaactgatcaattgatcttgtgacattccttctcctggacaatgagtctcaggagctcctcaccaagcaccttgttacccccacccctgcccacaagagaaaacgcacgttaactgtaatttttccactacctacccaaatcctataaaactgccccaccccatctccttttgctgactccaggtgattaaaaaactattgctcacacaaagcctgtttggtggtctcttcacatggatgcgcataac

SEQ ID NO: 2261 - DNA, 1089 bp, Homo sapiens
  source 1..1089: mol_type = other DNA
tttcttggttccctgactgggaagcgaggtgaatggcggatggtcaaggcagctccttaggcggcttaaacctgccctgtggaacatccctgcaggggactccaaccagcccgagcaacacggatcctgagggcgctcctggttaggcatttgccccactgggacgcctcgccagagcactgtatggcaggcccccatggaggatcaacgcagtggctgaacaccgggaaggaacgggcacttggagtctggacatctaaaacttggtaagagtagtctttgaaacttgcccactccatttgagtggaagcatggcctgatcacccatggcgtgcctttattggcactttggttttggtttgaattgcttgacaggattggtcttgggaacttgcctactccatttgagtggaagtgtggcctgatcacccatggtgtgcctctcctggcactttggtttttatttttgacttgacttggattgcttgatactttggttttggttttgacctggcttggatttctggatactctgattttggtttggtgcaaactgcaaaactgtgtgtgcgccctttttaccggttctttgttttgtggtgtgtttgtggtgtgagcgtggtgttttgtcttgaagaagcataggtcaggcacgaataagcccaccccactaggaactatgttgacaaatttcaaaaaagaatctgagggagactatggagtgctatgacaccaggaaaacttaaaactttgtgtaagatagactggccagcattagaggtaggttggccattagaaggaagcctggacaggtcccttgtttcaaaggtatggcacaaggtaacctataagccaaggaacccagaccagttcccttacagagacacttgattagagctggttttagaccccccacccccaacacatagtggttgagagaacagcagcataagtggctggcagaggcaaggaaagaccagcagagagagagaaaggaaagagacagagaggaaaagaggaaaagagagagaggaagagacaggaagagacagacagagagtcaaggatagagagagagagagagagaga

SEQ ID NO: 2262 - DNA, 49 bp, Homo sapiens
  source 1..49: mol_type = other DNA
aaatgaggggactcatctagaagacctctaaggtccccttttggctctg

SEQ ID NO: 2263 - DNA, 218 bp, Homo sapiens
  source 1..218: mol_type = other DNA
aaagaatccagcttcagggagcagcaaacccaaaatcttgcccagctccaccttatggagctggacaaccctgggggccaggcccttaatcattctgaacctcagttccttttttttaaaaaaggtcacaatacaagaacaagctctactaactttacagggttactgtgaggctcaagttagattaagttggaaggctacctagaagctgtgcagtg

SEQ ID NO: 2264 - DNA, 166 bp, Homo sapiens
  source 1..166: mol_type = other DNA
gtaaaaagagacctgcaagaagcagaaaatatttagagaacattttaatatatattttcatatatatatttaaagttaagaaaaataaaactaattcaagccatgccctgtgcaaaaaaaaaaaaaaaaagaaaaaagaaaaaaaaaggaaaagaaaacaaaaatt

SEQ ID NO: 2265 - DNA, 310 bp, Homo sapiens
  source 1..310: mol_type = other DNA
gccgggtgtggtggctcacacctgtaatcccagcactttgggaggccaaggcaggaggcttgcttgagcccaggggtttgagaccagctggggcaaatggtaagaccctgtctctataaaaaaaaatttaaaaaattagccaggtgtggtgctgcccacctgtggtcccagctacttgggaggcagaggcaggaggattgcttgagcttgggaggtccaggctacatgagctgtaatcacaccactgcacttcagcctgggccacagagagagaccctgtctccaaaaaaaaaaaaaaaaaaggagacaa

SEQ ID NO: 2266 - DNA, 192 bp, Homo sapiens
  source 1..192: mol_type = other DNA
agacagagtagactgtgggagggactgtctgaggcagtgagtactatttctggtgcagccactaacttgctgtgtgtccttggctgcacaaatcactcctgggcttaagtttttcatatgaaaactgaagatgcttctggtagctctcaggaccttccaattctgttgtctgtagcggggcttgtatgattc

SEQ ID NO: 2267 - DNA, 1226 bp, Homo sapiens
  source 1..1226: mol_type = other DNA
acaagcacccagcagtccctctacccacctgcctacatctgtactcatatacgatgccttcccttccgttcttacgaatgatttgttcatgtttctgtctactagaaactaatcccatcccttctcaccactcaagacctttggcaattctgccctctctctcctgtgccatcagttttccctgtctacaggatcatccccatcagcatacacagataaaatgtcatttcatcctaaaactctctcttgaccccatatcccccttcatttacctccagattttccctgctttccaatgcagcacatcccgaattaggtggtcatggttgctgtctccagatcctctcctcccattttccttcaaacccacttccatccttttgcctctcgcattccacagactgctcttgtcaaggtcaccactgacctctgccttgcgaaatcccaaggtcagttcccagtcctcagcccacatgacctgcctgcatccgtctgtcccagccgatcattccctcctctttaaaatactctcttcctttggctttcagagaacccctggttttcctccgcactgaccatcccttctcagcctttgctgctgcttcctcattatctccctgacctccaaatgtcagcaggcccggggctccattcctcagacgtcttctctgtctacactcactcctctggggatctcatccagtctatcaaataactttatgacgactcagatttgtatctccaatctggacttttcccttgaatggcatgtttgtatgtccaccttcctacatggcatctctacttaatgtctaacagggaatctcaagcctggcgttaactcacacctaagtactgagctttccccgccctgctcccccaacctgctcttacagtctttcttcctcatctcaataaaggcaaggctgttttccggtgctcagatcaaaaaccttactgcttctcttttttctcacacctcctttcaattcattagaaaacagttttgactctacctttgtaatgtatccagaattcagcctcttctcaccaccttcccagttcccactctgtctactccaagccaccaccactgttatttctttcctgaatcactgcagtagccccctaactaatcttcttgcttctagtgtattctcagcataggggctggagtggttcttttaaaacagaagtctgatcatatcacttctctgctccaaacc

SEQ ID NO: 2268 - DNA, 65 bp, Homo sapiens
  source 1..65: mol_type = other DNA
ctgcaggaatatgagccagtgtcttcactttgctcgtgcctcagttttacaattgtaaaataggg

SEQ ID NO: 2269 - DNA, 134 bp, Homo sapiens
  source 1..134: mol_type = other DNA
ctgggcatggtggctccaatctataatcccagctacacaggaggctgaggtgggtagactgcttgagcccaggagttcaaggtcagcctaggcagcatagggatatcccacctcataaaaaccaaaagacaaaa

SEQ ID NO: 2270 - DNA, 311 bp, Homo sapiens
  source 1..311: mol_type = other DNA
ggccaggcgaggtggctcacacctgtaatcccagcactttgggaggccgaggcatgcggatcacctgaggtcagcagttcaagactagcctggtcaacatggtgaaaccccgtctctactaaaaatacaaaatcagccgggtgtagtggcgcatgcctgtaatcccagctactcaggtggctggggcaggagaattgcttgaacctgggaggcagaggttgcagtgacccgggattgtgccactgacttccaacctgggcgacaagagcaagactctgtctcaaaataaaacaaaaaaaacaaaaaaacaa

SEQ ID NO: 2271 - DNA, 175 bp, Homo sapiens
  source 1..175: mol_type = other DNA
aatgcaggctcccaagtgagatgtgctagagttggaaatccaactctaccacttaggagctgtgtgactttgagcaaattagttaacctctctggacttcggctctctcatctgtcaaagaacagcacctacttcatagtaaggtaatccatgaaaagcacagggcttagaacag

SEQ ID NO: 2272 - DNA, 414 bp, Homo sapiens
  source 1..414: mol_type = other DNA
ctcccacatcctgcttattgcctgccacccctgcttctcgcctggacctcttggtattccgtgtacaccatccttgctgtttcttgcctctgtgccttcaacctgctgctcctggcctgggataccttttattttcttttatttcttcttcctttttttttttttttttttttttaacctacaactagctctcagttcaggcactgtctaaagccccaggctgggttaggtggtctaggataccaactccccctcaacattttaccttaatccaacagtacagtaattagccgaaacttgcctggtttttcctactagactgtaagccctctagggacagggacagtgtcttattcatctctgtgttcttagtgcagagcctggcccgctgttggtgtttaataaagtgtgttg

SEQ ID NO: 2273 - DNA, 315 bp, Homo sapiens
  source 1..315: mol_type = other DNA
gccaggccaggcagtggctcacacctgtaatcccagcactttggaatgctggggcaggaggatcacttgaggtcaggagctcgagaccagcctgggcaacatagggagacccccgccccccccgccatctctacataaaatttaaacattagccaggtttggtggcctgtgcctgtagtcccagctactcaggaggctgagatgggaggatcgcttgagcctgggagttcaaagctgcagtgagccatgattgcaacattgcactccagcctgggcgacggagcgagaccctgtctcaaaaaataaaaaccaaaa

SEQ ID NO: 2274 - DNA, 308 bp, Homo sapiens
  source 1..308: mol_type = other DNA
gccagacacggtggctcacgcctgtaatcccagcactttggaaggcccaggcaggaggatcccttgaggccaggaatttgagaccggcctgggcaacatagcaagaccccgtctctaaaataatttaaaaattagccaggtgttgtggtgcatgtctatagtcctagctactcaggatgctgaggcagaaggatcacttgagcccaggagttcaaggttgcagtaagctgtgattataaaactgcactccagcctgagcaacagagcaagaccctgtcaaaaaaaaaagaaaagaaaaaagaaagaaa

SEQ ID NO: 2275 - DNA, 258 bp, Homo sapiens
  source 1..258: mol_type = other DNA
ggcagacagtaggcatgaggttttgtagcatcttctgagcattttccagtacatcatctgcttttgtgctgctggaagctgagaccatcagcaggagttttctgtgcctcctgcaagttgctgatttctcacagttgctactggctttctccaatgttcacttctctatccctttcagtggtttataaatacttcattcctatagtagatcccttcctgcttatattaataatacctagaggggacatggttttcctg

SEQ ID NO: 2276 - DNA, 107 bp, Homo sapiens
  source 1..107: mol_type = other DNA
ccttctgtgttctctcctgcatggtagaggctggaagcctaagagctatattcctcagaatttcctgccagccaggatttgctttaaagtccactaatgagaggcac

SEQ ID NO: 2277 - DNA, 122 bp, Homo sapiens
  source 1..122: mol_type = other DNA
aaacagtgcagtgtgcaaataacactcagttgggaatcgggagaccggggactagtctaactggctcaaactagctgtgaccttaggcgtgtcattcaccacttggggatcatttcctcatc

SEQ ID NO: 2278 - DNA, 300 bp, Homo sapiens
  source 1..300: mol_type = other DNA
gctgggccgggtggctcacacctgtaatcggagcactttgggaggccaaggcaggtggatcacttgaggccaggagttcgagaccagcctggccaacatggtgaaaccttgtctctactaaaatacagaaattagctgggcatggtggcacatgcttgtaatcccagctacttgggaggctgaggcaggagaatcgtttgaacccgggaggcagaggtttcagtgagctgagattatgccactgcacttcagcctgggcaacaaagcaagactccgtctcaaaaaaaaaaagaaaagaaa

SEQ ID NO: 2279 - DNA, 118 bp, Homo sapiens
  source 1..118: mol_type = other DNA
gctgggtgcagtggctcacacctgtaatcccagcactttgggaggccaaggacaggagcatcacttaaggccagaagtttgagaccagcctgggccacatagtgagaccctgtctcta

SEQ ID NO: 2280 - DNA, 217 bp, Homo sapiens
  source 1..217: mol_type = other DNA
ttgaagtttgacatactgaaattcaggctctgtcaatttcatctctgtaacctttattgtttctgagtcttgagttttctcatctgtaaaatcaagataatgacattaatacaatcccttgtggagcaactgtgaagactaaataagacaatttcattaagttcctggcatagttctagacacgtagtagacattcaacaaatgataactattttta

SEQ ID NO: 2281 - DNA, 376 bp, Homo sapiens
  source 1..376: mol_type = other DNA
gttacagactgaatgtttgtgtccccccaaaattcaggtgttcaagccttaacccccagtgaggctatatgtggccatagggatgaggccttgatccaacaggatcagtgtccttgtaagaagaaacaccagaaatctgactccctgatgctcttccccagcttgaatgcaccaaggaaaggccatttgtggggacatagcaagaaggcagctgtctgcaagccaggaggagaaccctcaccagaaacctcacagaaatcggccaacaccctcatctcgggcttccagcttcagaacaacgagaaaacaaatttctgttgtgtaagcaccccagtctatggtatttttgttacagcagcctgagctatctaagaca

SEQ ID NO: 2282 - DNA, 329 bp, Homo sapiens
  source 1..329: mol_type = other DNA
ggaaaaaagctagaatgaaccatgaggtagtactagaaatgggagtatagtataaacccatgttttaaaaaatacatagatctaaaaatatacacatgtatacattatcatacatacatacatataattccattgctctgttcactgagaggatctgggaatagcaacactccaatagcaatgagcacatctagcacccagatcttggcttctaaataccattctccactttaaaggaaccagggctccttgaagaaacagctgattctaggactggatcaaggagagcacaggatgagcctggtatatcttgttgtgccagaaaacaa

SEQ ID NO: 2283 - DNA, 211 bp, Homo sapiens
  source 1..211: mol_type = other DNA
cagcctggacaatatagtgaggcctcgtttctgcaaaaaaattagccaagcatggtgacacgcacctgtggtcctagctacttgggaggctgaggcaggaggatcacttgagcccaggacacagaggttgcagtgagccaagattgtgccactgaaatctactctaacctgggtgacagaaagggaccttgtctcaaaaacaataataata

SEQ ID NO: 2284 - DNA, 305 bp, Homo sapiens
  source 1..305: mol_type = other DNA
gccgggtgcgatggctcatgcctgtaatcccagcactttggaatgccgaggcaggcggatcacctgaggtcaggagttcgagaccagcctgaccaacatgacgaaaccctgtctctactaaaaatacaaaagttagccaggtgtggtggcgcatgcctgtaatcccagctactcaggaggctgagacaggagaatcgcttgaatccaggaggtggagaatgcagtgagcagagatcgcaccactgcacgccagcctgggtgacagagcaaaacttcgtctccaaaaaaaaaaaaaaaaaaaaaaa

SEQ ID NO: 2285 - DNA, 110 bp, Homo sapiens
  source 1..110: mol_type = other DNA
tgtggatgactcctaaatataacttcttccactagctctagatccgtatttccaataaaatcccctacctgaatattcaagttaaacatgtccagaatacttactgattt

SEQ ID NO: 2286 - DNA, 300 bp, Homo sapiens
  source 1..300: mol_type = other DNA
gccaggcacggtagctcatgcctgtaatcccagcactttgggaggccgaggtgggtggatcaccatcaggagttaaagaccagcctggtcaagatggtgaagccccatctctactaaaaatacaaaaaaatagccgggcgtggtggcgggcgcctgtaatcccagctactcgggagggtggggcagagaactgcttgaacctgggaggtggaggttgcagtgagctgagagcgtaccactgcattccagcctgggcaacagagtgagactccgtctcaaaaaaaaaaaaaaaaaaaaaaa

SEQ ID NO: 2287 - DNA, 202 bp, Homo sapiens
  source 1..202: mol_type = other DNA
taaggaaactgttcaaagtagaggcagatcttgatagaaagatgttaatcacagggttgtttataatagcaatatacatacacatttggctagtactaggtgaataggaaaataaatcatgctgtatgtatacaataagaggtcaagttgccaataaattattactgttaatgttctgggaaatgctgaaactatgctaagt

SEQ ID NO: 2288 - DNA, 302 bp, Homo sapiens
  source 1..302: mol_type = other DNA
ggccgggcgcggtggctcacatctgtaatcccagcactttgggaggccaaggcgggcggatcatctgaggtcagtttgagaccagcctggctaacacggtgaaaccctgtttctattaaaatacaaaaaattagctggtgtggtggcacgtgcctggaatcacagctacttgggaggctgaggcaggagaatcgcttgaacccgggaggcggaggttgcagtgagccaagatcgcgccattgcactccaacttgggcaacgagagcgaaattctgtctcaaaaaaaccccaaagaacaaaaa

SEQ ID NO: 2289 - DNA, 61 bp, Homo sapiens
  source 1..61: mol_type = other DNA
tttagtcgtcagggaaagcttcgactgcaaaaatggtatgtcccactatcggacaaagaga

SEQ ID NO: 2290 - DNA, 428 bp, Homo sapiens
  source 1..428: mol_type = other DNA
tccaggggtggaatacatgtcctggactaagccaatgacaccttccatctttccagctatggtgactgggttaggtatgatcttgtgagttaagacaatgaagccagagggaatttcaagacttatgggaatgctgggtagaagctgttttaattcccctgttgaatgtgaaaaaggtagtagtattcctgggtctttatgatgaccaccttgggccttgggatcatgaccaggaatcacgtgaagctgacaccactgaagggagagttgagaggcagaaagagatcaagtccttggtgaaattgtttaagtacaggatcaagccttgcttgagattggccttacctctggactttttttgttatatgagctaataaattctgtttattgtttaagttgggttgagtttaatttctgttacttataac

SEQ ID NO: 2291 - DNA, 132 bp, Homo sapiens
  source 1..132: mol_type = other DNA
tgggcgtggtgcatgcctgtaatcccagccactcaggaggctgaggcggggaggatccattgagcccagcagtccaacctgggcaaaatagtgagagaccctgtatctgaaagtaataataaaaataaaaaa

SEQ ID NO: 2292 - DNA, 221 bp, Homo sapiens
  source 1..221: mol_type = other DNA
aggtagctttgcgtagtagaaaaagtttggacttcggaggctcaggatctgggttctaatccctccctcccttggaaccctccattttcccaggactaaaataaaagaatgggaacgccgcctacctcatacgacttttaggaggaccgagaggcgatatgatatagacggggggcgctttgcactgcgtgaagtgctctacaagcccgaggtgtcagtac

SEQ ID NO: 2293 - DNA, 333 bp, Homo sapiens
  source 1..333: mol_type = other DNA
tgtaaattggtattgccttctagaaagcagtcgggtgttaagtatccagagtcattaaaatgtttgtaacctttaacgtcataatcgtacccctgattattttaatcttaggaaatagtccaaaggaaaaaaaaaatgtgcatgagaattttaattgcagtatttctgttaattatggctaaaaattggaaacaaccttaatgaccactagtaggggaatgttaatgtaaagtacagcacgttaatgcatttggtgtattttcttgtcttttaaaatgaggtatgattgtatcagcatatggaacagttcacaaaatattaagcaaaaatgca

SEQ ID NO: 2294 - DNA, 304 bp, Homo sapiens
  source 1..304: mol_type = other DNA
ggctgggcgtggtggctcatgcctgtaatcccagcactttgggaggccgaggcaggcagatcatgaggtcaggggttcaagaccatcctggccaacatggtgaaaccccatctctactaaaaacacaaaatttagctgggtgtggtggcacgcacctgtagtcccaggtacttgggaggctgaggcaggagaatcgcttgaacctgggaggtggaggttgcagtgagccgagattgtaccaccgcactccagcctgggcaacaagagtgaaactccatctcaaaataaataaataaataaataa

SEQ ID NO: 2295 - DNA, 372 bp, Homo sapiens
  source 1..372: mol_type = other DNA
catggaatactatacagccacaaaaaggaattgagatcacgtcctttgcaagaacatggatggagctgtaggccattatccttagcaaactaatgcaggaacagaaaaccaaatactgcatattctcacttacaagtgggagctaaatgatgagaacacacggacacaaagaggggaacaacagacattgggggcctgcttgatggtggagagtgggaggaaggagaggatcagaaaacgtatctactggctactaggcctagtaagtgggtgatgaaataatctgtacaacaaacccccatgacatgagtttacctgtataacaaacctgcacatgtacccctgaacctaaaataaaagtttttttaaaaa

SEQ ID NO: 2296 - DNA, 281 bp, Homo sapiens
  source 1..281: mol_type = other DNA
gccgggcatggtggctcacgcctgtaatcccagcactttgggaggcagaggcgggtggatcatgaggtcaggagattgagaccatcctggctaacacagtgaaaccccacctctactaaaaatacaaaaaattagccgggcgtggcggcgggcgcctgaggctgaggcaggagaatggcttgaacccaggaggcggagcttgcagtgagccgagatcgcgccactgcactccagcctgggcgacagagagaaactccgtctcaaaaaaaaaaaaaaaaaaa

SEQ ID NO: 2297 - DNA, 303 bp, Homo sapiens
  source 1..303: mol_type = other DNA
ggctgggcatggtagctcacgcctgtaaacccagcactttgggaggccgaggtgggtagatcacttgaagtcagaggagtttgagaccagcttgaccaatatagtgaaaccctatcttcacaaaaaatacaaaaattagttgggtgtggtgacttgtgcctataattccagctactctagaggctgaggtgggaggatcacctgagcccagggaggtcgagtctgcagtgaactgtgatcacaccactgtactccagcctgggtgacagagtgagaccctgtctcaaaaaaaaaaaaaaaaga

SEQ ID NO: 2298 - DNA, 149 bp, Homo sapiens
  source 1..149: mol_type = other DNA
ctagagttacttttaatacaggatctgttgggtaataaagcaggaatagacagatcaatttaatagaataaaatagaaagaccaaaacatgcgcatgtatacttacaaattcagtttatgataagaaagggattttaagccagtatgaa

SEQ ID NO: 2299 - DNA, 131 bp, Homo sapiens
  source 1..131: mol_type = other DNA
ctgggtgtggtggttcacgcctgtaatcccagtgctttgggtggccaaagcagtatgattgcttaagaccaggagttcaagaccagcctgggcaacacagcaagtcccggtctctaaataaaaagaaagaa

SEQ ID NO: 2300 - DNA, 100 bp, Homo sapiens
  source 1..100: mol_type = other DNA
agagttactgtagaaaggatttccacatcaagtagaaggctgaaccagacgacctttaataacttttatcagttgagactgtgagattcaatgactccat

SEQ ID NO: 2301 - DNA, 143 bp, Homo sapiens
  source 1..143: mol_type = other DNA
ggtttccatgtcctttggcttctggttgagttcactcagtggagaaccctggcaagaggcaggaaaaggggaggaaggtaagatcagggtattttctccagtggcttcctacatgagaagtcattttgggttggctgtttccc

SEQ ID NO: 2302 - DNA, 128 bp, Homo sapiens
  source 1..128: mol_type = other DNA
attattgagctgatgaatgaacccttcctgaagccacctacttcctcacttattggtgtgtccttactgtgtaaaccccttttaactgggtgttttgtttcttgcagccaaaaacaatccattgatac

SEQ ID NO: 2303 - DNA, 68 bp, Homo sapiens
  source 1..68: mol_type = other DNA
tttccagtttgttttcaacaaaaacaacaaagaaaaaagggatggacaaaaaggcatttatacaaatc

SEQ ID NO: 2304 - DNA, 295 bp, Homo sapiens
  source 1..295: mol_type = other DNA
gctgagcatggtgcctcatgcctataatcccaacactttgggaggccagtgtgggaggatctcttgagcccaggagttcaagactagcctgggcaacacagagagaccccatctctaaaataataataataataaaataaaaaattagcagggcatggtggcatgtgcctgtagtcccagctacccaggaggctgaggcaagaggatggctggagcctgggatgttgaggctgcaatgaactgtgattaccccactgcactccagcctgggcaaaagagcgagagaccctgtctc

SEQ ID NO: 2305 - DNA, 187 bp, Homo sapiens
  source 1..187: mol_type = other DNA
ctggctccctcactagttaactgtgtgaccttgggcgagtgaccaaacttcagtctccccatctgtaggttgggcataacaggacctgactgctagagttgtgagaggtgaaaatgagttgattcaactaaaagccaggagcacacagcctggcctgaattaattgtgatgactgtttgtacttatt

SEQ ID NO: 2306 - DNA, 308 bp, Homo sapiens
  source 1..308: mol_type = other DNA
ggcaggcacagtggctcacgcctgtaatcccaacacttcaggaggccgaggcaggcagagtgcttgagctcaggagttcgagaacagcctgggacacatagtgaaacccccctctctaccagaaatacaaaaattagccagatgtggtggcatgtccccatagtcccagctactcaggaggctgagatgggaggatggcttgagcccaggaggcggactttgcagtgagttgagatcatgtcactgcattccagcctgggtgacagaacgacactgtctcaaaaaaaaaaaaaaaaaaaagaaagaaa

SEQ ID NO: 2307 - DNA, 231 bp, Homo sapiens
  source 1..231: mol_type = other DNA
aagagacacaagggaatgacatgcaccctgaatcaaggtctgcacgctgtcacttggcagctgtaggacctggtcatgttgcttgtcccctaggcctccatgtgcccatctgtgcaatgggatagtagtggtttgcactgtacaaggtggttgtagaagtgagagcctctgcctagaaagcccttagtatagtgcctggtacgtaatgactgctcaaggaagggggagctt

SEQ ID NO: 2308 - DNA, 325 bp, Homo sapiens
  source 1..325: mol_type = other DNA
tccgccatcacgggagggtctaagggtgagggtggactggcaaagaccatgaagacactttgcagggcactggtattattctgtacctatggtacacttcagattcgttgcagtacagtgcatgcaaattttactttaaaagaaaaaatatctgccatcaaatattaaactcgagtgaatgatctgaacaccgcagtatttggagagaagaatactaatgtctgcaacttacttggaatggatcaaagaacatgggacagaaagaggctggaagagcaggtaagtgataaagcaagtcaactgtggaatacaaaagtcaactgtg

SEQ ID NO: 2309 - DNA, 301 bp, Homo sapiens
  source 1..301: mol_type = other DNA
gccggacgcggagattcacacctgtaatcccagctcttagggaggccgaggcaggtggatcacctgaggagttcgagaccagcctgaccaacatggggaaacaccatctctactaaatatgcaaaaattagccaggcatggtggcacgtgcctgtaatcccagctactcgggaggctgaggcaggagaatcgcttgaacctgggaggtggagattacagtgagccaagattgcacccaagattgcaccatcgcactccagcctctgggactagagcgagactctgtcaaaaaaaaaaaaaa

SEQ ID NO: 2310 - DNA, 296 bp, Homo sapiens
  source 1..296: mol_type = other DNA
gctgggtgcggtggctcacacctgtaatcccagcactttgggaggccgaggcgggcagatcacgaggtcaggagatcaagaccatcctggctaacaaggtgaaaccctgtctctaccaaaaatacaaaaaattagccaggtatggtggcaggtgcctgtagtcccagctacttgggaggctgaggcaggagaatggcgtgaacccgggaggtggagcttgagccaagatggtgccactgcactccagcctgggcgacagagcaagactccatttccaaaaaaaaaaaaaaaaaaaa

SEQ ID NO: 2311 - DNA, 324 bp, Homo sapiens
  source 1..324: mol_type = other DNA
gatggatattctgatatatgctacaatgtggatgaaccttgaggatgttaaactaagtgaaataagccagtcacaaaggacaaatactatataatatctttcatatgaggcacatagaacagtcagagttgcagagatgaaaagcagaatgatggtttccaggggctggggagaaaagagaatgggaaatgattgtttcatggggatagagtttcagttttgcaagataaaaaagttttgtggatggatggtgatgatggttgtgcaacagtataaatgtgctttgtgccactgaactgtacacttaaacctggttaacatggg

SEQ ID NO: 2312 - DNA, 134 bp, Homo sapiens
  source 1..134: mol_type = other DNA
gccaggcatggtggttcacacctgtcatcccagcacttgaggaggcctaggcaggagaattgtctgagcccaggaattcaagactagcctgggcaacatggtgagaccccctctatttaaaaaaaaaaaaaaaa

SEQ ID NO: 2313 - DNA, 167 bp, Homo sapiens
  source 1..167: mol_type = other DNA
acaggactcagagagaaacgtgaatttcagaaaaacaaatcatttttcacataagtgttccaaatattgcgtggggcatattaatgctagaaaattatcttttgtttacctgaaatttgcgtttaactcagcactctgttttggttttgctaaatctggccaaccct

SEQ ID NO: 2314 - DNA, 103 bp, Homo sapiens
  source 1..103: mol_type = other DNA
ctcgcctacaaactccttgaaagctgaaacccagtgacttgtgtgtatctgtatgccccgtttccccctaaacttaagtgcttgatatgtttgtgacttgaat

SEQ ID NO: 2315 - DNA, 60 bp, Homo sapiens
  source 1..60: mol_type = other DNA
ctgggaggccttaggcaagtcaccttacttatctaagactgtttccccacctggaagatg

SEQ ID NO: 2316 - DNA, 311 bp, Homo sapiens
  source 1..311: mol_type = other DNA
gccgggcacagtggctcacgcctgtaatcccagcacttttggaggctgaggtgggcggatcacttgaggccaggagtttgagatcagcctggccaacatggcgaaaccctgtatctactaaaaatacgaaaattagccaggtgtggtggtgcgcgtgtgtaatcccagctacttgggaggctgaggcatgagaattgcttggacccgggaggcggagtttgcagtgagctgagaccatgccactgcactccagcctgggtgacacagtgagactccgtctcaaaaaaaaaaaaaaaaaaaaaaagaaagaa

SEQ ID NO: 2317 - DNA, 293 bp, Homo sapiens
  source 1..293: mol_type = other DNA
gccgggcgcggtggctcacgcctgtaatcccagcactttgggaggccaaggcgggcggatcacctgaggtcgggagtttgagaccagcccgaccaacatggagaaaccctgtctctactaaaaatacaaaattagccaggtgtggtggtacatgcctgtaatcccagctactagggaggctgaggcaggagaatcactcgaacccgggaggcagaggttgcagtgagtcaagatcacgccattgcactccagcctgggcaacaagagcgaaactccatctcaaaaaaaaaaaa

SEQ ID NO: 2318 - DNA, 65 bp, Homo sapiens
  source 1..65: mol_type = other DNA
tcccaggtttctagaatagtgtctggcatgtagtagatgctcaataaacacttgttgaatgaatg

SEQ ID NO: 2319 - DNA, 64 bp, Homo sapiens
  source 1..64: mol_type = other DNA
agacttcttacacaggatgcccatgatcagctccccattctccaccaccacctaaggacaaagc

SEQ ID NO: 2320 - DNA, 48 bp, Homo sapiens
  source 1..48: mol_type = other DNA
tgtgggtggcaacccattagcagatcacaaaatcactgtagtgggtaa

SEQ ID NO: 2321 - DNA, 340 bp, Homo sapiens
  source 1..340: mol_type = other DNA
gctgggtctgatggctcacacctgtcatctcagcactttgggaagctgaggcaggcagatcacaaggtcaggagatagagaccatcctggccaacatggtgaaacccagtctctactaaagaaggtacgcgcctgtagtcccagcactcaggaggctgagccaggagaattgcttgaacccgggaggtggaggttgcagtgagccaagattgtaccacttcactccagcctggcgacagagtggaactccgtctcaaaaaataaaataaaataaaataaaataaaataaaataaaataaaataaagcaaaaatataaaatgttaaaaaaaaaacaaaaaa

SEQ ID NO: 2322 - DNA, 281 bp, Homo sapiens
  source 1..281: mol_type = other DNA
gccgggcgcggtagctcatacctgtaatcccagcactttgggaggccaaggcaggtggatcacctgaggtcaggagttcgagaccagcctggccaacatggtgaaacctcgtctctactaaaaatacaaacaattagctgggcgttgtggcaggcacctgtaatcccatcacttgaacccgggaggcggaggatgcagtgagccgaggtcacaccaccgcactccagcctgggccacaagagcgaaactctgtctcaaaaacaaaaacaaacaaacaaaaa

SEQ ID NO: 2323 - DNA, 325 bp, Homo sapiens
  source 1..325: mol_type = other DNA
ggccgggcgcggtggctcacgcctgtaatcccaacactttgggaggccgaggcaggtggatcacctgaggtcgggagttcgagaccagcctgaccaacaaggagaaacccccatctctactaaaaaatgcaaaaaaaaaaaaaaagaaagaaagaaattagccgggcatggtggcacatgcctgtagtcccagctactcgggaacctgaggcgggagaatcgcttgaacctgggatgcggaagttgcagtgagctgagattgcaccattgcactccagcctgggcaacaagagcgaaactccatctcaaaaaaacaaagaaagaa

SEQ ID NO: 2324 - DNA, 307 bp, Homo sapiens
  source 1..307: mol_type = other DNA
ctggacgtggtggctcacaattgtaatcccagcactctgggaggctgagacaggtggatcgcctgagcccaggagtttgagaccagcctgggcaacactgtgagaccccatctctacaaaacatgcaaaagttggctggccatggtggcatgaacctgtggtcccagctactccggaggctgaggcaggactgctcgagccggggaggcaaaggctgcagtaagccaagatcacgccactccactccagcctgggcaacaaagcgagacccagtctcaaagaaaaagaaaaaaaaaaaaaaaaaaga

SEQ ID NO: 2325 - DNA, 102 bp, Homo sapiens
  source 1..102: mol_type = other DNA
tctctaacttcaaggcccatatctgtgaaatgctggcatttgcacctacctcacagagtgcattgtgagggttaatgaaataatgtacatctggccttgaaa

SEQ ID NO: 2326 - DNA, 1010 bp, Homo sapiens
  source 1..1010: mol_type = other DNA
ctgcttctggctaagacagactagccagtgtcagaccaaccctgccgccgggaactaaaatgcttaggtaaataataaaaagcaactgtttgaaggtattagaagctactaggacactgaagactttgaggccaagatcctagagagaagggaggtctaaagaggcagaataaacatttggtgccacatgacccctcagaagcatttgccagcttcagtgctaggactgaaaacctgaacaaaaagctgaggttgagcagctaagcagagttttcaatagatgtcagaggcgggggtcacaaaaacgggagttcagggatgacagaccctggtaaacatcccaggcttttggttggaaccacccttcttaccccctaaaaaccccaactttttaccctaggtgtatggtgaacctaaaaattttcctgaaatccagccctcacaaaacacaaaaacttagttttgaattggctgaaatagattaaagtgattcacccttgctcttaaatgcttgtcagaagcaaaactaaatcctctctagaggaaggtaacattcacagcctcagcctatctccacagttttgtgcatgcaagattaacattcagtcaaaaactaagcatataaaaagaggcaggcgataaggttacccacaggagatctagatattagggttatcagacatggaccttaaggtaatgttgataaatatgtttagtaaattaagtgacaaatggaggatttcagaaagaactggacactattaaaaaagttaaatggaaattctggaattgaaaagtgcaatatagggtgacaatagtttacaataatcttttgtatattttaaaatagctagaagagaagaatttgaattttttaacataaagacatttaaggtgatggatatcccaattacactgatttgatccttacaaatcatatgaatgtactaaattatcacatgaatcctgaaagtatgtgtatctgttatgcatcaattaaaaattaaaaa

SEQ ID NO: 2327 - DNA, 310 bp, Homo sapiens
  source 1..310: mol_type = other DNA
gtcaggctcggtggctcatgtctgtaatggcaacactttgggaggctgaggctggatgatctcttgagcccaggagctcgagaccggcctgggcaacgtagtgagacccccatctcgacaaaaaagtaaagaattagccgggcatggtggcacacgcactttggtggtcccagcactttgggagtggtcccagcactttgagaggatcccctgaggccgggaggtcgaggctgcaatgcgccaagatcgcgccactgcactccagcctgggacacagaccgagactctgtctcaaaacaaacaaacaaaa

SEQ ID NO: 2328 - DNA, 127 bp, Homo sapiens
  source 1..127: mol_type = other DNA
gccgggcgcggtggctcacacctgtaatgccagcactttgggcagctgaggcgagtggatcacctgaggtcaggagttcgaaccagcctggccaacatggtgaaactgcatctctactaaaaataca

SEQ ID NO: 2329 - DNA, 156 bp, Homo sapiens
  source 1..156: mol_type = other DNA
gtcggactccattgctggatgtgtgacttgggtttaagcttctcccttctgctctcatctggaaatgctgacagcctgggcatttcctcctttggcactggagactgaagcctggcaaggccctgccctcagcaggaactccccctgggccccact

SEQ ID NO: 2330 - DNA, 309 bp, Homo sapiens
  source 1..309: mol_type = other DNA
ggctaggcatggtggctcacacctgtaatcccagcactttgagaggccgaggcgggtgtatcacctgaggtcgggagttcgagactagcctgaccaacatggagaaaccctgtctctactaaaaatacaaaattagctgggtgtgctggtgcatgcctgtaatctcagctacttgggaggctgagacaggagaatcccttgaacctgggaggtggaggttgcagtgagtcgagatcatgccattgcactgcacctgggcaacaagagtgaaactccgtcttaaaaaatataagaaataaaaaaataaaa

SEQ ID NO: 2331 - DNA, 57 bp, Homo sapiens
  source 1..57: mol_type = other DNA
gcctggccaacatgacgaaactccgtctctacaaaaaatacaaaaaaattagccgca

SEQ ID NO: 2332 - DNA, 214 bp, Homo sapiens
  source 1..214: mol_type = other DNA
ggaatgggtgattgtatgtgtccacttgactgggctacagggtgcctgagtgtttggtcaaacattattctgtttctggcaggggtggggaggggttgcatgagactaacatttgaatctgtagacttttgcattagattacattgacattttaatcagtaaggcagatgccctccaagatgtgggcgggccttgtctaatcagttgaaggcct

SEQ ID NO: 2333 - DNA, 443 bp, Homo sapiens
  source 1..443: mol_type = other DNA
tatttatgcctgattcatggctgaaatttcaggatgaaagctatgaaatctctatttgtgtttgtgtatctattaatgtatgttatgtatatgtgatattttcttaactccagagagcattgcaaaattcatttatgaaatcctctaaaagtgctctattctaacttggcttggaaaaaaataagcatttataaataaatattcaccaaactcctagaaatataggaactgatcaaatgtttcttaagttaacatgatttggataaaacttagttaaataagattaatatagtatttttggtgtaataaaacaactgtatcttcaaaattattattgaatataaaacaagcataaattcctattctgcttgagttctagtcaaataagctaatattatacttactagaaacataaaatcttaaagcttatagatttgattcta

SEQ ID NO: 2334 - DNA, 193 bp, Homo sapiens
  source 1..193: mol_type = other DNA
caaggtagagcagcggtacggccgagtctacgcttgggaattcatttgctgactcttatcatttactgactaaagcaaagttactgaggcctcagtttcctcatctacaacccggggagatgaccagtacccatcacaatcgattgctatgaagattcaatgataatgcagataaggcacttaatacagtgtc

SEQ ID NO: 2335 - DNA, 132 bp, Homo sapiens
  source 1..132: mol_type = other DNA
ggctgggtgaggtggcttatgtctacaatcccagcactttgggaggccaaggcaggcagatggcttgagcttaggagtttgagaacagcctgtgcaacatggagcaactccatctcaacaaaaaaaataaaa

SEQ ID NO: 2336 - DNA, 380 bp, Homo sapiens
  source 1..380: mol_type = other DNA
ttaagtttagcctaaagtctctttacatatctcaagttcagcttaaaggtttctcagtacatagaactgtagcctaactggacgtgtaaacagacggtaccctactcttgtggcaatcactaagtttcagccaaccaaagacagcgaactgttcaaaccatattcaaataaggcaaacgctgaactgtaactaatccggctgttgctgtatctcacttccattttccatacatcactttccttctgtccataaatcttcaactatgcagctgggctgaagcctctgagcctattatggttcaggggctacctgatttgtgaattgtcctttgctcaattaaactctgccaaatttaatttgtctaaggcttttattttaa

SEQ ID NO: 2337 - DNA, 312 bp, Homo sapiens
  source 1..312: mol_type = other DNA
gccaggcacggtggctcacgcctgtaatcccagcactttggaaggccgaggcgggtggatcacctgaggtcaggagttcgagaccagcctggccaacatggcgaaacctcgtctctactaaaagtacaaaaattagctgggtgtggtggcgggtgcctgtcatcccagctactcaggaggctgaggcaggagaactgcttgaacctgggaggcggaggttgcagtgagctgagattgcgccactgcactccagcctgggcgacaagagcaagactccatctcaaaaaaaaaaacaaagaacaaaaaacaaaa

SEQ ID NO: 2338 - DNA, 1125 bp, Homo sapiens
  source 1..1125: mol_type = other DNA
gatgcagaaattcttaacaaaattttagctaatcaacccaatatataaaaaggatatatatcatgaccaaatagattttatcccaggtatgaagttggttcacatttgaaactcaaacaatgtaattcaaaaattagcaaactaaagaaggaaaaccataattccctcaatagataaggaaaaatcatgtgacaaaattcaacattcattcccaataaaaattctcagcaaactagaaatataacacctgataaaggacatctacaaaaaaccctacatgaacatcttatataaggatgaaaaatgacaactttctctctaagatcaggaacaagacaaaagatgtctactctcaccatttttatttaacatggtattggagtttctagttgaggcaagcaggagggtggggaaggaacatgggggagcattcagattgaaaaggaaggagactgtctttattcacagacaacatgatttctatgtttgaatattcaatgaaatctacaaaaacactactagatgtgattttagtaaagttatagttttgataaaatatcaatacacaaaaataagctgtatttgtatatactagcaactaataactggaaactaaaattttaaaaaatttacaatagcatcaaaacacataaaatacttagaaaaataaatgtaagacctatatagtgaaaattatatgacactgttaaaaaaaattttaagggacatatgccatgttcataggttggaagactaaataatactgtcagttctccccaaattaatctataaattcatggcaattacaatgaaactcctagtaagcttttacgtacaaactgacaagctgattctaaaatttatatggaatccaaagaacttacagtgccaaacaactttgtataaaaagaacaaagttcaaaaactaatactacctgattataaaacttattttaaaactataaaacttataaaactatactaatgaagacagtgtggtactggcataaagatacataaacagatcaatggaacagaatagagttcagaaacagacacatgtttatggacaactgattttttgcaaaggtaaaacgacaatccagtaggtaaaagagagttttt

SEQ ID NO: 2339 - DNA, 335 bp, Homo sapiens
  source 1..335: mol_type = other DNA
gctgggcacggtggctcacgcctgtaatcccagcactctaggaggccgaagcaggcggatcacgaggtcaggagatcaagaccatcctagccaacaaggtgaaaccctgtctcaactaaaaatacaaataaaaataaataaataaataattaaaattagctgggcatggtagcgcacacctgtagtcctcgttactcatgaggctaaggcaggagaatcgcttgaacccggaaggcggtggttgcagtgagctgagatcgcgccactgcacaccagcctggtggtgacagagcgagactcatctaaaaaaaaaaaaaaaaaaaaaaaaaaaaaaa

SEQ ID NO: 2340 - DNA, 81 bp, Homo sapiens
  source 1..81: mol_type = other DNA
tgtttttgtaatttgttttctagtagctagcagagagcctggcacatagtatgtattcaaaacaagtgtgttaattaataa

SEQ ID NO: 2341 - DNA, 1169 bp, Homo sapiens
  source 1..1169: mol_type = other DNA
aatattaacttttgattactcatctttttttatagtctgtgtggcaagtgaagtacaaatgaagtactcccgattcatattgaagcatgatggttgttttaggaaagacacctatgccattatttgagttgtgagctgaactagcagctttttttcccccaaggaatatcattcttacttaaaagaacaatactaataaacaaacatactgattattcagacttgcatatttggtggacattttatcaatgatgtgaccctgtcatttccaggataacaactgaaagtatttgttgctaatagtaaaatttgagctttcaaccaaaatttagaagtgtgaaaaactccatgaacttgatggcttcccaataattaaagacttttttttaaaaatgagatttatgatgatggtaaccgatgtgactttttgatgttatataaaatctgccaacatttggaaaatctacataactcagaaaaactaatattctcccaaacgataaatgcactgtgttcaaaatcacgcacgaataaaagatcctttcagagtgtgagatagatggacttcaatgtaatagtataaacattcagttatatggtttcaaattgcatattgtaactagcatttaagaaacattgctttttgagttttggtgtagcatcaaagaaaaatattcacaattagctgaaaaggctattaaaatacttctttttccagctccaagctgtgtgagagtagatttgttcccccatactttaatcaaaacaacatatcacaatggattctataaacagatatgatgagaatccagttgtcttccattgatatgatgagaatacagttgtcttccattaagtcaaacattagatttgcaaaaatataaacaataactcttttcttactcatttttttgtgggttaaaatattatatcacaaaatatgtaatttatgttaatttagttgatttattattattttaggtatgttgataaatattttaaatttttttcagttttaatttctaatgtggtaagttttaatagatataatacacataagcaaatatctctcagtagttaaaatactagaaattattgaggccctcaacaattttcaagagttgtgaagaggttctgagattaaaaaaaaaaaagttagagaaccactg

SEQ ID NO: 2342 - DNA, 333 bp, Homo sapiens
  source 1..333: mol_type = other DNA
cagaaaacatacaccgtggaccagaggtcttaatcctatctatggatgtgttttgtgtgacccatacagtgttgtaaaaaacacttagaaccattattctaaaaaatggggctatttcacattaaagtccagatttctgcttctttttaaacatcagaggctctggctacacagaggcctttgttctttcctggcatcagtctgcaggaccaagcggtggtggctcacttgggaagagccttgtgctctccactttgccacagtaccactgccaccatgctgctcacttatgtcatccacttggcccttgtatgacctgaatttgcaacctct

SEQ ID NO: 2343 - DNA, 283 bp, Homo sapiens
  source 1..283: mol_type = other DNA
ggcacggtgactcacaccttaatcccagcacttgggaagcctcagcaggcggatctcagaagttcaagaccaatctgcacaacatggcgaaaccctgtctctacaaaaaaacaaataacaaacaaacaattagctgggcatgcctgtagtcccagctacttgggaggctgagatagaagagctgattgagctcagaaggtcaaggctgcagacagccgtgatcatgccattgcactccagcctgggaaacagggcacgaccccgtctcaaaaaaaaaaaaaaa

SEQ ID NO: 2344 - DNA, 390 bp, Homo sapiens
  source 1..390: mol_type = other DNA
acatatacaccatgaaatactatgcagccataaaaaaagaatgagatcatttcctttgcagggacatgggtgaagctggaagccattattctcagcaaactaacacaggaaaagaaaaccaaacactgaatgtcgtcactcataaatgggagttgaaatatgagaacacatggacacagggaggggaacaacacacaccaggaactgtcggtgggtggagggcaaggggagggagagtattaggacaaataccttatgcatacaggacttaaaacatagatgacaggttgatagatgcagcaaaccaccatggcacatgtatacttatgtaacaaacctgcacgttctgcacatgtgtcccagaacttaaagtaaaattaaaaaaaaaaa

SEQ ID NO: 2345 - DNA, 235 bp, Homo sapiens
  source 1..235: mol_type = other DNA
aggcaatgtgagtagtggacaagagcccagctttggagtggacagacaagtttgaatctcagctttggccttgaccttgagaggaggacatttcggggcttcagtttcctcacatataaaatggggatgttgatacctacttcatgggactgttacagggattaaatgaggccatataggtacaatgctcaacaaagggcaagatgcctctgattcacagtaatatgattaataa

SEQ ID NO: 2346 - DNA, 168 bp, Homo sapiens
  source 1..168: mol_type = other DNA
aaagagtaatgggcatgaggttcaaagacgctagtttgtgtccagctctatttattattagctgtgtgcccttccccaagtaatgtattcttttttgaggatcggtttcgttatctgtaaacaaacaataattaaggcctgccgggatgttataaaaaccatacagta

SEQ ID NO: 2347 - DNA, 303 bp, Homo sapiens
  source 1..303: mol_type = other DNA
ggccaggcgtggtggctcacgcctataatcccagcgctttgggaggctgaggtgggcagatcacgaggtcgggagatcgagaccatcctggctaaggtggaaccctgtctctactaaaaatacaaaaaattagccaggtgtgatggtgggcacctgtagtcccagctactcgggaggctgaggctggagaatggcatgaacctgggaggcagagcttgcagtgagccgagattgcaccactgcactccagcctgggcaacagagtgagactctgtctcaaaaaaaaaaaaaaaaaaaaaaaaa

SEQ ID NO: 2348 - DNA, 242 bp, Homo sapiens
  source 1..242: mol_type = other DNA
ctctgtacagtgatacacttaaaaacactatacatatagaagtggaattctgtaaatgctcaagtaaataacaggatggtaggaaaaaaaaaacagtgaaatccaaaatagagataacaaacaaaaaatggcagatttaagcactaaagtattgtattaatatttacagtaaatgtaaatggtttaaatataccaattaaaagacagatattagcagagtgcattaaaaatatgagccaact

SEQ ID NO: 2349 - DNA, 328 bp, Homo sapiens
  source 1..328: mol_type = other DNA
ggccggacacggtggctcacacctgtaatcccagcactttgggaggccgaggtgggcagatcacgaggtcaggagatcgagaccatcctggctaacacagtgaaaccccatctctactaaaaatacaaaaaaaaaagaaagaaaaaaaataaaattagccagtgtggtggcgggtgcctgtagtcccagctactcagaaggctgaagcaggagaatgatgtgaacccgggagacggagcttgcagtgagctgagattgcaccactgcactccagcctggccagcctgggcaacacagcgagactctgtctcaaaaaacaaacaaacaa

SEQ ID NO: 2350 - DNA, 836 bp, Homo sapiens
  source 1..836: mol_type = other DNA
atgtgtgacaataacaaaaggtctaaaattcatgtcttggagacctgaaggaaaggaaaaattgggcgaggctgaaaaattgctaaaaaatggctgaaaacttcccaaatttgacagaagtcatagacctacagatttaaacacctgagtaaatctgaatgctaaaaaaccttccaaggatatccatgtcaagacacatcatagtcacatttatgaaaattaaagacaaaaaagttttataaacagcaagagagaaatgctactttaccaaagaagaaaatccattagaatgacaatggattttcatcagaatacatagagtccaaaggaagtaacacaacatatttcaattgctttaagaaaaggcctctcaacctagaatcttatgtccagtgaaaatccttcaggaagaaagaaaaaatcaagacattctcagctagaggaaaacaaaatattttgtcaccagcagatctgacctgctcacaaagggtggctagagaaagttcttaaaacaaaaaggaaacaataaaagaagaaaggttagaacatcaagaaaaaagaacatggtaagcaaaaaatatgaataaatgcaacagaccttccttctttgcttgttgaagcaaaaattataacactgtctgatgtggttccaaatgtatgtacaggaaatatttaagacaatcatattataaatggaggctgtaaagggaggtacggtttctatacttcattcaaattgataaaatgacaatgggagtagccagtgataaattatgtgtatatgatgtaatacttagagtgatgattaaaaaaacaaaacaaaacaaaaaaatacc

SEQ ID NO: 2351 - DNA, 493 bp, Homo sapiens
  source 1..493: mol_type = other DNA
tgtggtaagctgaataatggctcccaaagatattcagcagaatggctccaatccctggaagctgtgaatggaaaaaagagatttggtagatgtgattattctacaactcttcagataaggagaatggcctgcactatccaggtggctcctaaatgtaatcacagtgtccttaaaggagggaggcaaagagcagagataaatctggccgcagaaaagtaagtaggagatacgatgacagaggaaagaaattggagtgatccaaggaagggattgtagtcaaagaatacaggtgcctctagaagctaaagaaagcaaagtaatagattattccttagaacctccagaaggaagcagccttgctaacaccttgacgttagccctgtgaaactgatttttgagttctggccttcagaactgtaagaaagtacatgtgcacttctgtaaggcatgcactgtatggtaatttgttacagcagccataggaaatcaatac

SEQ ID NO: 2352 - DNA, 1423 bp, Homo sapiens
  source 1..1423: mol_type = other DNA
ggcttttgcttctgtgaagaaggagaaaaagcactttcccctactcttcttactaagtacaactgaaacccctgtattttatatattaaataaacatacaaagacactgaaagctggagaagagaagacaaatcagctaggggacctcagagctcaaggaatgacatgatggtgagttccctggaatcgtgtgttgcctcacatatccaattcttggggctaaagaaactggaaacccagaaatgccatcaggcacaacttttaaaagggtgccaacaaaaccatactctctctggcctaaggaacaggaaaggagcatcatagctagataaaaaaacaaatttaggcaataactgctctattgtagccacagaagaaagaaataattgtggttccaccacacctatgccaacacaagctgtgtgggaaacctacacttccatccttgccaagctgtaacaagacaccccaacttctcccatccccaccgtgatgatgtcatagaaggccaagtaaaaagctgggactttcattttcaccagtggtaataaagaccccccctattcctcacccccactatgttgtcaatagtaatggtgggaggatcctggagttctacccctgccttgcagtactgagtctcccttctccttctctcctgggatggtgtcacaggtggcttaatggagagtcagaactgtcactaagacccagcagtcattaggccccctcttctgtccccctagtgtgtcagtggagagaccacatggggaacataaaggaggcacttctacccttcatagctggaagtatcagtgaagacccactttgccctacagtaatgtgaagtcccctcaggtgtcaagggagactgagtgaggaacctaatttctaccccccacctggcactgatgctcactgaggtgatgttagtggaactcggctaaatcagaaagtttaaataagattcagagtctcttaacatataagaaaatggccaagtttccattgaaaatcattcatcataccaagaaccgggaagatttcaaactgaatgaaagacgacaatcaacagatgctaaaagcaagatcccagagatgttagaattatttgacaaagtttttaaagcagtcataagaaaaacatttcaattgaatgattataaacatgcttcaaataaataaaaaaatataaaactttggccaagaaatagaacacataaggaaaaactaagtagaaattttagaattgaaaaaaatacccaaaatataaaaatcagtgggtgggctcaagagcagaatgtgagtgacagaaaagaacatgggagctacaagatagaaaaatagaaatcactcaatttgaataacagagaaaacagattagagaataaaaagagagagaaagaaagcctcagaaacctgt

SEQ ID NO: 2353 - DNA, 168 bp, Homo sapiens
  source 1..168: mol_type = other DNA
atgctgatcctagtaacaatgacaattctaattgtgattaagcaaattcttatttatagctcagtctctataagcttaatgtggctttgtctttcagagaaggatctgggttctgaatttataaatgaggataaatccatggactttcatgaattcactgaaagtaat

SEQ ID NO: 2354 - DNA, 171 bp, Homo sapiens
  source 1..171: mol_type = other DNA
gaatttcagctctaccttttggtggctctgtcatattcaacaagttacataggatcacttttcctatctttttctcatctagaaattagagctaataatactagcacaaagggttactgagtaggattgagataatacagatgaaatgtttaaaattgttcataacagatg

SEQ ID NO: 2355 - DNA, 299 bp, Homo sapiens
  source 1..299: mol_type = other DNA
gctggatgcagtggctcattcctgtaatctcagcactttgggaggctgaggcgggtggatcacctgaggtcagaagttcacgaccagcctgaccaacatggtaaaaccctgtctctactaaaaataaaaaaaattagctgggcatggtggcaggcacctgtaatcccagctacttgggaggctgaggcaggagaaacacttgaacccgggaggcgaggttacagtgagccaagatcatgccattgcattccatcctgggagacaagagtgaaactccatctcaaaaaaaaaaaaaaaaa

SEQ ID NO: 2356 - DNA, 1326 bp, Homo sapiens
  source 1..1326: mol_type = other DNA
tccacaaccatctgatctgtgacaaacatgacaaaaacaagcaatggggaaaggattccctatttaataaatggtgctgggaaaactggctagccatatgcagaaaactgaaactggaccccttccttacatcttacacaaaaattaattcaagatgaattaaagacttaaacataaatcctaaaaccatacaaaccctagaagaaaacctaggcaatatcactcaggacataggcatgggcaaagacttaataactaaaacaccaaaagcaattgcaacaaaagccatatttgacaaatgggatctaattaaactaaagagctactgcacagcaaaataaactatcatcagagggtacaagcagcctacagaatgggagaaaatttttgcaatctatccatctggcatccattctggatattaatccagaatctacaagaaacttaaacaaatttacaagaaaaaacaatcccatcaaaaagtgggcaaacaatatgaacagacactttgcaaaagaagacatttatctggccaagaaacgtgaaaaaaagctcatcatcactggtcattagagaaatgcaaatgaaaaccacaatgagataccatctcacaccagttagaatgacaattattaaaaagtcaggaaacaatagatgctggtgaggctgtggagaaataggaacgcttttacactgttggtgggagtgtaaattagttcaaccattgtggaacacactgtggcgattcctcaaggatctagaaccagaaataccatttgacccaacaatcccattactgggtatatacccaaaggattataaatcattctactataaagacacatgcacacatatgtttactgcagcactatttacaatagcaaagactagggaccaacctaaatgcccatcaatgatagactggataaagaaaatgtggcacatatataccatggaatactatgcagccattaaaaagaataagttcatgtcctttgcagggatatggatgaagctggaaaccatcattctcagcaaactaacacaggaacagtaaaccaaacactcatattctcactcattagtgggaggtgaacaacgagaacacatggacacagggaggggaacatcacgcaccagagcctgtaggggggttggagggaagaggagggagagcattaggacaaataccaaatgcatatggggcttaaaacctagatgatgggttgataggtgcagcaaaccaccatggaacacgtatacctatctaacaaacctgcatgttctgtgcatgtattccagaacttaaagttaaaaaaaaataaa

SEQ ID NO: 2357 - DNA, 2470 bp, Homo sapiens
  source 1..2470: mol_type = other DNA
aattacaattaaaatggtggatgggatacttgcttaagtctaccctctccctcctaaaggaactgctataatgacaactaaaaaaagaatgaaaaagaaactcactttctaaagaaaacaggagagaacacaacagcagagagctattgactttttttttttttaatggaaatggaatgaatgagtggtatgtgtttttagctaaacagagatgtagaaacccaggtgtctgcagaggagatgccaaaaagaaacaaatgggaactccattgagaaccctcaaaagactcaaagactggaggcaaaaaggattgctgacgctaagggacagacttgaggctgaaaacaggactgtttgaaattcttaacaagaacacctggactcccaaattccctcctcaactttttgcagcctgacagctacccctctctcaccctgtaagagagatggcggggtattattctctggagtaacttaactatagaggctacaagcttagcattattggggacagtggcagatgaggatgagatacgatatagaaatctgggagacttaagtagaaatctgcgtgccgaatagtaacaaactctactttcccttcaagccttcttaggtggctcagctcccaggacactggcaaccaggctgtacttcccaggcagaacattggagggggcaccttcctagagggtctgactacccaagggggaagaaatcttgctaatcttgagggcatttcggtgaaacaactcagctttgtctaatggttttatggtaatgtcctggagcccataatacattgcttgagcagacagctaaagaataccacatatggaggaaagtctccaacaaagagaccaaagcaaactaaccaacaagaaatggaaggaaacaaagactctggagagaacagaaagctgttacatgtagctttaaaaagctgaaatgtgtattatagatagtaaaaaagaaattgtgttcatgaaactaaacatggtgctatgaaaaaggagaaattagagaaaatttaattcttaaaaattaaaaatgttaggcgaaataatataatcaacagaacaaagatgagagactcttctagaggtagatgacaaaaagaagataaatagaaaagataataacgttagagtttgagtctcaaggttagtttcagaataaaagaacagaagaaatagaggtcagaaattgctaaaagtacataacaaaatttcctggaactgaataaatgagtaaaagtccctgaatttcaaatataatcaactgggggaactcatgcatatcgcaccaaatgtgctgttatgagacaatagaacaccagggataaagaagaaatcataagtgttttcagagagaagaaggagggagggaagaggagaaggaagaaatgaacaagcaaggaaaggaacaaagaaagatagaaagtcaaataaaatgaatcgggaaacaaaataacttcttaataacactggaagctaaaagacagtaaagaaatcccttgaaatttctgaggaaaaggtatttctaaacaatgaattctgtgtaaagtaaaagtaacaattaatgtaataagagaataaagaaatattttcaaacatttaagttctccaaaaatgagtttgtcccaaacatctttctcaggaagctactgcatgctcgcccacccacccatgagggagtccatcgagaaagaaaaacaaagaattcagggaacgggacccaaactacagagaggcaaagagcagtcctaggatgacagctcagtagcaagattgccacaaaaagcatgagggtactaaaaaacaacaacaacaacacaactaacatatttgactgtattaagaggaatgttgcatttctattggagagtttgaggaaatataagatgggcagatgaaaaattaagaaaacaaaaatatgatgcaactaatatcaggaaaaagaagaaaaaaatgtgtaaaagaaatgtaatcatacattcccatgtggcttacatgtggataatatatacaagttaaaataatgtaaaccctaattagtagtttatctaagattgttgtgtagttaaattgggaagattaagctaagggaagcatgtgtgtgctcatgtgtgtggtagggaggtaggtgacagggaggcaggaaagaagaaagagagagagatagggagagaggacacacatgctggaggaagtattatatataatatcctacatagaatccttatctcccatagtaggaggccaaaaggtaatatcaacatttgaaaatcaaaaagtaggtatctgagtatcatgtgggaatatggaatcatcatcataatgaacagttagatgaagatggttgcctctgggcttcaaaggtatagagaggtgggtgggacattcttttaagctctacagttttgtgtagtttttaagaatatgtgcatgaatttttattaatatgaaa

SEQ ID NO: 2358 - DNA, 2073 bp, Homo sapiens
  source 1..2073: mol_type = other DNA
agtcatatttcattttattgcaggtcactttatttccattcacagatactgtaatttttttacaaattgaaggtttgtggcaaccctgcctcaagcaagtctatctgccatttttccaacaacatgtgctcacttcatgtctctgtgtcacattttgataattcccacaatatttcaaactcattattatcctattgattatggtgatctacaactagtagtctttgatgtggctattataattgttttggggtgccatgaactacactcatataagacagatattttaatcaatgttgtctgcattctgactgctccactgaccagccattcctccatttctctccctatcctccaacctccctattctctgagacacagtaatgttgaaattaggccaagtaataaccctacaatggcttctaagtgtttaagtgaaaggaaggatcctgtgtctctcactttaaataataattagaaatgattaagttaagaaacacatgttgaaagccaagacaggctgaaagctaggcctcttgcaccaaacagtcagccaaattgtaaatgcaaagtaaaagggaaagttcttgaaggaaattaaaagtgctaccccagtaaaccatatgaatgataagaaagtgaaacagccttattgctgatataaagaaaattttacccatctgggaggaagatcaaattagccacaacattcccttaagccagagcctaatccagctcaaggccctaactcttcaattctgtgaaggctgacagaggtgaggaagctacagaagaagagttggaagctaggagaggttggttcatgaggttgaaagaaagaagctgtctccataactaacgtaacagaacaaggtgaagtaccaagtactgatgtagaagctgaagcaagttatccataagatctagctaagaagactgaggaagataactccactaagcaacagattttcaatttagacaaaacagctttctataggaagaagatgccttctaggattatcatagctagagatgcaaagccaatgcctgccttcaaagcttcaaaggataaggtgcctcttgttagggtctaatgaaactgataactttaaattgaagccaatgcttatttgtcattcaaagaccctaggtcccatcagaataatgctaaatttactctgcctgttctctataaatggaataacaaagcttggatgataatgcatctgtttatagcatggtttcctgaatttttaaaaatattttaagcccactattgagacttactgctaaaaagaaaaagataatgttcaaaatattacttctcattgacaatgcacctggagcatccaggagctctgatggagatgtacaatgagattcatgtcgttttcatgcttcccaagacaacgtccattctgtagaccatagatcaagagtaatttcaacttccaagtctcattatttcagaaatacatctcccaaggctgtagctgcaatagacaatgattcctctgatggatctggacaaagtaaatcaaaaagcttctggaaaggattctccatcctagatgctattaaggatatttgtggttcatggcaggaggtcaaaatatcattaacaggagtttagaagaagttgatttcaaccctcatgaatgactttgaggggtccaaaacttcagtggaagaagtaacagcaaatgtagtgcagatagcaaaagaaatagaattagaagtagagcctgaagatgtgactgaactgctgcgatcttttgatagaacttgaaaacaagaggagctggttcttacagatgagcaaaggaagtggtttcatgagatagaacctattcctggtcaagactctgtcaacattgttgaaatgacaaaaagtaatgtacagtatttcaaaaacttagttgataaggcagtgacagggtttgagaggattcgctccaattttgaaagaagttctactttgggtaaaatgctataaaacagcatttcacagtacagagaagtctttcatgaaaggaagagccaattaatgcagcaaacatcattgtttcctta

SEQ ID NO: 2359 - DNA, 123 bp, Homo sapiens
  source 1..123: mol_type = other DNA
ttacggatgtgtaattttgagcaagttacttaacctctctgagcgtcagttgaccaagctgaaaagataagtctattttacttcaaggactaggaaacaatacctataaaacaaagcacagtg

SEQ ID NO: 2360 - DNA, 1479 bp, Homo sapiens
  source 1..1479: mol_type = other DNA
cctaggcaaaaagaacaaagctggaggcataacactacctgacttcaaactatactataaggctacagtaaacaaaacagcatggtactggtaccaaaacagatatatagatcaatggaacagaacattgatcagaaataacacctcagaaataataccacacatctacaaccatcggatatttgataaacatgacaaaaacaagcaatggggaaaggattccctatttaataaatggtgctggaaaaactggctagtcatatgcagaaaactgaaactggaccctttctttacaccttatacaaaaattaactcaagatggattaaagacttaaacctaagacctaaagccataaaaaccctagaagaaaacctaggcaataccattcaggagataggcatgggcaaagacttcatgactaaaacaccaaaagcaatgacaacaaaaggcaaaatagacaaatgggatctaattaaactaaagtgcttctgcacagtaaaagaaactatcaacagagtgaacaggcaacctacagaataggagaaaatttttgcaatctatccatctgacaaagggctaatatctagaatctacaaagaacttaaacaaatttacaagaaaaaaaaaaaacaaccccatcaaaaagtgggcaaaggatatgaacagacacttctcaaaagaagacatttatgcagccagcaaacttatgaaaaaaagctcatcatcactggtcattagagaaatgcaaatcaaaaccacaatacgatactatctcacaccagttagaatggcgatcattaaaaagtcaggaaaaaacagatgctggagagaatgtggagaaataggaacacttttacactgttggtgggactgtaaattagttcagccattgtggaagacagtgtggcgattcctcaaggatctagaactggaaataccctttgacccaacaatcccattactgggtatatacccaaaggattataaatcattctactataaagacacatgcacacgtgtgtttattgcagcactgttcacaatagcaaagtcttggaaccaacccaaatgtccatcgatgatagactggattaagaaaatgtggcacatatacaccatggaatactatgcagccataaaaaaggatgagttcatatccttttcggggacatgtatgaaactggaaatcatcattctcagcaacgtaacagaagaagagaaaaccaaacactgcatgttctcactcataagtggtagttgaacaatgagaacacatggacacagggagggaacgtcacacaccagagcctgtcggggagtggggggctggaggagggatagcattaggagaaatacctaatgtaaatgacgagttcataggtgcagcaaacccacatggcacatgtatacctatgtaacaaacctgcacattgtgcacatataccccagaacttaaagtataataatttaaaaaaaaa

SEQ ID NO: 2361 - DNA, 190 bp, Homo sapiens
  source 1..190: mol_type = other DNA
aacaatagaaacaggattactagagcagggagggaggaaggggagaaagggttgaaaaactaactcttgggtactatgttcagtacatgggtgatcattcacaccccaaatctcagcatcatatcacacaatatactcaggtagcaaacctgcacatataccctctgaatctaaaataaaagttgtaaaa

SEQ ID NO: 2362 - DNA, 294 bp, Homo sapiens
  source 1..294: mol_type = other DNA
ggccaggcgttgtggctcacacctgtaatcctagcactttgggaggccaaggcgggcagatcacatgaggtcaggagtttgagaccagcctgaccaacatggtgaaaccctgtctgtactaaaaatacaaaattagctgggcgtggtggtgcatgcctgtaattccagctacttgggaggctaaggcaggagaattgcttgaacctgggaggcggaggttgcagtgagccgagattgcaccattgcactccagcctgggaaaaaagagtgaaactctgtcaaaaaaaaaaaaaa

SEQ ID NO: 2363 - DNA, 156 bp, Homo sapiens
  source 1..156: mol_type = other DNA
tgctattgtttgaatgtttgtgccccaccaaattctcatgctgaaacttaatcccttaatgcgatggtattaccaggtggggacttttagcaggtgatcaggacttgagggcagaactttcatggtggggattagtgcccttataaaagaggcccc

SEQ ID NO: 2364 - DNA, 278 bp, Homo sapiens
  source 1..278: mol_type = other DNA
ggccggtgtggtggctcacgcctataatcctggcactttgggaggctgaggagggcggatcatgaggtcaggagattgagaccatcctggctaacacggtgaaaccctgtctctactaaaaatacaaaaattagctgggcgtggtggtgggcgcctatagtcccagctactcgggaggctgaggcaggagaatggtgtgaaaccgggccaagatcgcaccactgcactccagcctgggcgacagagcaagactccatctcaaaaaaaaaaaaaaaaga

SEQ ID NO: 2365 - DNA, 296 bp, Homo sapiens
  source 1..296: mol_type = other DNA
gccaggcacagtggctcacgcctgtaatcccagcacttggggaggctgaggcgggcggatcacgaggtcaggagatcgagaccatcctggttaacacgatgaaaccccgtctgtactaaaaatacaaaaaaaatagccgggcgtggtggtgggcgcctgtagtcccagctactcgggatgctgaggcaggagaatggcgtgaaccagggaggcggaggttgcagtgagccgagatcgcgccaccgcactccagcctaggcgacagagcaagacgccatctcaaaaaaaaaaaaaaa

SEQ ID NO: 2366 - DNA, 77 bp, Homo sapiens
  source 1..77: mol_type = other DNA
atggcacatgtatacctacgtaacaaacctgcaggttctgcacatgtaccccagaacttaaagtaaaataaaaaaaa

SEQ ID NO: 2367 - DNA, 296 bp, Homo sapiens
  source 1..296: mol_type = other DNA
gccgggcaaggtggctcacgcctgtaatcccagcaatttgggaggctgaggtgagcagatcacctgaggtcaggagtttgagaccagcctggccaatgtggtgaaactccatctctactaaaaatacaaaagttggccaggcacagtggcgggtgcctgtaatcccagctactcaggaggctgaggcaggagaataacttgaacctaggaggcagaggttgtggtgagccgagatcgtgccattgcactccagccgggacaacaagggtgaaaatccatctcaaaaaaataaaaaa

SEQ ID NO: 2368 - DNA, 69 bp, Homo sapiens
  source 1..69: mol_type = other DNA
tcaacctcttttctttatcagttacccagcctctggcattcctttacagcaacataaagggactaaaac

SEQ ID NO: 2369 - DNA, 301 bp, Homo sapiens
  source 1..301: mol_type = other DNA
gctgggcacggtggctcacgcttgtaattccagcactttgggaggcgacggcaggtagatcgcctgaggtcaggagtttgagaccagcctggccaacatggtgaaaccctgtctctattaaaaatacaaaaaaaaaaaattagctgggtgtggtggtgggtgcctgtaatcccagctactcaggaggctgagacagaagaatcgcttgaacccaggaggcggaggttgcagtgagccaagatcgcaccattgcactccagcctgggcaacaagagtgaaactccgtctcaaaaaaaaaaaa

SEQ ID NO: 2370 - DNA, 361 bp, Homo sapiens
  source 1..361: mol_type = other DNA
tgctatggtttgaatatttgacccctccaaacttcatgttgaaatttgatcctcaatgttggaaataggtcctaatgggaggtgtttgggttatgggggtagatccctcatgaatggcttggtgccattctcacagcaatgagtgaggtctcactctattagttcccttgagggctggttgttaaaagtagcctggcacctcttgtctgtggcttgcttcctctctcctcatgtgatcttggcacaaaccagcttccctttgccttctgtcataagtggaagcagcctgaagtctcaccagaagcagatgctgatgccatgcttcacgtacagcctgcagaaccatgagccaaataaacct

SEQ ID NO: 2371 - DNA, 297 bp, Homo sapiens
  source 1..297: mol_type = other DNA
gccgagcacggtggctcacacctgtaattccagcactttgggaggccgaggggggcagatcacttgaggtcgggagttcgagaccagccaacatggtgaaaccccatctctactaaaaattcaaaaattagccaggtgtggtggcgcatgcctgtaatcccaactactcgggaggctgaggcaggagaatcacttgaaccttgaaggcagaggttgcagtgagccaagatctcaccactgcactccagcctgtgcaacagagcgagactctgtctcaaaaaaaaaaaaaaaaaaaaa

SEQ ID NO: 2372 - DNA, 605 bp, Homo sapiens
  source 1..605: mol_type = other DNA
gcttagaactctttaatagattcctattggacctagtttacaacccagacccctcaccatggtgtacaaacctgcatgtgacttagcccttgcctactcctttctcagcctcagatctcatggggttctcccattcaatcactacatttagtcatgtcaatttttgatcaattcctccaacgaaccaagctctttcctgcctcaagactccaatactagttctcccctctgtctagaacattctttcccatttcacccctactatatgcacatgaacttgcttgtctagcttccaatcttagattaaagacacctcccccagtaggtcctctatattagtctctattatagcatactatttttattttcttcttatcagctgcagtcattgtttggttggttagttggttagctgtttggctggttagctcattggttggttggttggctgactggttagttggttggttggtggctggttggttggcttactatttactgtatcttcagtggggcagggaccctctccaacttgttcaccaccttatctctgacatctagcacagtgccaggcacatagtaggtgctcaataaacatctgttga

SEQ ID NO: 2373 - DNA, 371 bp, Homo sapiens
  source 1..371: mol_type = other DNA
gttatggattcaattgtgtctcccccagtattcatatgctaaagcatatgaataccctcagtaccttagaatgtgactatatttggagatagggcctttaattacagttaaatgaggtcatagtgtggggccctaatctcataggactgctgttcttttaaggaaaggaagagacactagggtagagaaaaaaggttatttgcggacacagcaggaaggtgtccatctgcaagtcaaggacaggagaaaccaaccctgctggcaccttagtcttggacttccagcctccagaacagtgagaaaataaatttctgttgttcaagccatcaagtctatggcattttgctttggcattcttagcaaactaatac

SEQ ID NO: 2374 - DNA, 596 bp, Homo sapiens
  source 1..596: mol_type = other DNA
ccagctcatctccaccaccacccagttcagcctgtccttttcaaaaacatcaatcttatgttattccaggtttaaaccctctaatgtgttcccatcacacttcagttaaatcctactcctcttaccatcacctgcaaggtcttacctgacctgattccctcctgccattccagcctcagctcaccttgctcagcacactcccacctcccatgtgttcctcctgtctacagcctttgaattagtcattccctcagcctagaaagctcttcctccaggtctctgtgtggatggctccttctcatcactggggtctcagctcaaatatcatctcctaaaagaccacctgtctgatcctacctaattgcccctagcccagaaactagtctcaattacatacccctgtgtgtgtgttgggggcaggaggttgtcacttatcactatctgaaataatcatgtgtgtttgtttcttcgtttattgtctgtcttcctggactgaaacggaagttctttgagaacagaggccatggctaaatggtccctggagcccagaaccaggcctggcaattgtagaagctcagtagatatacattgagtga

SEQ ID NO: 2375 - DNA, 220 bp, Homo sapiens
  source 1..220: mol_type = other DNA
gggtttggggctagccagcctggattcacatcacgtctaccacctacttgttatcgaacttggggaaatctttcaactggtctgtgcctggattctctcatttaataaacagagataataatggtacctatatataatagaactgttatagaatgaaataaaataacattaaagaagtcagcagagttcccaggtacagactgactactcgatgcacgtt

SEQ ID NO: 2376 - DNA, 306 bp, Homo sapiens
  source 1..306: mol_type = other DNA
ggccgggcgcggtggctcacgcctgtaatcccagcactttgggaggccgaggcgggcggatcacgaggtcaggagatcgagaccatcctggctaacacggtgaaagcccgtctctactaaaaatacaaaacattagccgggcgcggtggcgggggcctgtagtcccagctactcggcggggggctgaggcaggagaatggcgtgaacccgggaggcggagcttgcagtgagccgagactgcgccactgcactccagcctgggcgacagagcaagactccgtctcaaaaaaaaaaaaaaaaaaaaga

SEQ ID NO: 2377 - DNA, 143 bp, Homo sapiens
  source 1..143: mol_type = other DNA
ttcttatccattcctgaaaccagactgctgagggccttcatggggcaacttcttcttggcttatttccagtttctttatgtctgcaagtaataaaactggatttatttagaaatattttatatttagtagctttcagcaattc

SEQ ID NO: 2378 - DNA, 485 bp, Homo sapiens
  source 1..485: mol_type = other DNA
tctaaaacctctaaattctctccttagatcatgttttaccatgagaagtctatatttggacagcatttgtttatttccttgcagaaccgcctctatagggctgggattgataaggttctgcttttaattttgactgaggtcagtataagaaacagccacatgaaatctatgactgctttttttccttttctatcgtccagtactcctataaagctcccagtgaagactttctttcatattttatgccaacagaaattttgttcccctgagaagtggtatttctgtactgataaaaccaccgataattttccttttttttttttttttgcttcattgccagaacatgcagagtaacatccttgtcccttaagattagcatattcacattttattttctttagtttttgatttttctatttcaattttatgaagtcactgtttatatcttttgttgtaagctgcctcaggtcctttttgaaaagagg

SEQ ID NO: 2379 - DNA, 186 bp, Homo sapiens
  source 1..186: mol_type = other DNA
aatagttctcaaagtgtgttccccggacaagcagcatctgcaacacttaggaaggtcttcgaaatactaatttgtaagccccacctcaggcctactgaatcagaagctctgggggttgggtccagaagtctgttttagtcaaccctctaggtgattctgatgctcgctaaaggttgagaactactg

SEQ ID NO: 2380 - DNA, 305 bp, Homo sapiens
  source 1..305: mol_type = other DNA
tctagcaccccagagtgtggctcctcagtgagttctgccagctcagcactgcagtggcatctccatccagtgggctgtggctgtgccctctccaacaaggcctggatctaagacctggcaggaaaggggaagttgtggcaccctcctgcaaatttgttcttacctttgatgttctgcctcagccctagagacactctatatctgttattgctgtattcttttgagtttcactttttgttataacacttagtagttaataattcttaacattaaactttccctgttcaaatgattatgtggtttct

SEQ ID NO: 2381 - DNA, 181 bp, Homo sapiens
  source 1..181: mol_type = other DNA
tagccaggcatggtggtgtacaactgtagtcctagctactctggaggctgaggcaggaggatcactttaacccaggggttcaaggctgctgcagtgagctgtggttgcaccactgcactccaacctgggtgatagagtgagaccccatctaaaaaaaaaaaaaagaaaaaagaaaaagaaa

SEQ ID NO: 2382 - DNA, 154 bp, Homo sapiens
  source 1..154: mol_type = other DNA
gtggctcacgcctgtaatcccaacactttgggaggcagatgtggaagcatcatttgagcccaggagtttgaggctgcagtgagctatgattccaccattgcactccagtctgggcaacagagcaagaccctgtctatttaaaaaaaaaaaaaaa

SEQ ID NO: 2383 - DNA, 223 bp, Homo sapiens
  source 1..223: mol_type = other DNA
cagcctgaccaacatggtgaaaccctgtctctaccaaaaaataaaaaataattagctgggcatggtggcaggcgcctgtagtcccagctattcgggaggctgaggcatgagaatcacttgaacctgggaggtgggggttgcagggagccgagatctgccactgcattccagcctgggcaacagagtgagactctctcaaaaaaaaaaaaaaaagaaaaaaaaa

SEQ ID NO: 2384 - DNA, 471 bp, Homo sapiens
  source 1..471: mol_type = other DNA
gtggatatattgtttttatttgttcagcatctccttccccatcttctggtaacacaacctttatttatttgtggggaacctattccctgtggcttaggtgagcatgtgaccaggcctggcctcctgagtcccacagcttcctagccacagtgataaaagaatgggtatataacttaagccaggctaaggaaagcccttaacagaacttctgctggaactactggaaagaaggctttatggagatcccaggaaccaaggaccatgtaagcctgaatttgtgccatgtggagagagtctgtctgaggagaaactcggatgctagcagaaatggaaagagaactaagttctgatgtcatttttctggaggccctagatccagctgtgcctaaagcctgccctacctccggactttaaagttttgtgagccaataaagtccctttcttgtttaagataattgaattgagtttctg

SEQ ID NO: 2385 - DNA, 383 bp, Homo sapiens
  source 1..383: mol_type = other DNA
taacccaatagaaagcaggtaagggatacaaacaatccacagtaaactataaatggccaataaacatgaaaataaccccaatctcaccatttttttttataatcagggaaatgcaaaataagaaaaggttctttttcgcccaacagataaaaactatcaagtgtaggtatggttatatggggaaatgaacattctccatacacttggtgaaaatacagttatgaaggcctttgggaagactgaaggtggacagagaacaaaccctttgatccaaaaatccaccttactggactccagactaaagaaatattcacacacatgcacaaagacatctgaataggatgtttactttggcaatgtaatagcgagaggaaaaaaattaa

SEQ ID NO: 2386 - DNA, 557 bp, Homo sapiens
  source 1..557: mol_type = other DNA
caacaacagaccacatatatgacagtagtcccatatcattataatggaactgaaaaatacctatggcctagtgtcactgtagccaccatcaacatactagcgtaattacttaatctgcaaaatacatttagaagagcctaagtgtacagtgttgataaagtctacagtagtgtatacagtaatgtcttaggccttcacattcactcagcactcacttactcacccagagcaagttccacttctgcaagctccattcatggtaagtgccctatacaggtgtacaatttttcatcttttataccatatttatactgtatcttttctatgtttagatacacaaacactattgtactacaattgcctacagtattcagtagagaaatatactatgcaggttaatagactgggagtaataggctataccatatagcctaggtgtgtagtaggctgtaccatctaggtttgtgtaagtgcactctataatgtttacacaatgacaaaattgtctaatgacctatttctcagaacatacctcagtcattaaataacacatgact

SEQ ID NO: 2387 - DNA, 69 bp, Homo sapiens
  source 1..69: mol_type = other DNA
atacctgaaacctgcctacctcataggacagctgtgaggatcaaaaaatatatgaaagttccttgtaga

SEQ ID NO: 2388 - DNA, 186 bp, Homo sapiens
  source 1..186: mol_type = other DNA
agtgctgtccaacagaactttctgtggtgatggaaatgttccatatctttgtgctaatacagaatctaccagccacatgaatactcaaaatgtggctaatgcaattgaagaaatgaatttttcatacaatttactttaaatttaaatagtcatatgtgactagtggctcctgaatgaacaatgcag

SEQ ID NO: 2389 - DNA, 103 bp, Homo sapiens
  source 1..103: mol_type = other DNA
gaagctggatggtgagtcagcctccttgtaggagaacatttccctggctgagagattgaatgggacaactctgagggcccttcgacttttgagtctttgaatc

SEQ ID NO: 2390 - DNA, 534 bp, Homo sapiens
  source 1..534: mol_type = other DNA
gcagagaaaagttaacatagtagccctaaggttgcaatctttggaaaggcctgcttgccaggagattggtcattggctttcagcatgttccctttgcttcctaattgataagggtggttcgctgtgcctagattgtttgttcaaataatatgctttatactaaacaatccactttccttctgggagtctggaattttgtacttgcttgacagaggttgcctgggtcaccagttcctgataaaaccttgggttctaagtctctaatgggctttccttgtcagaaacattacacccatgttactgctttttattttttatttttggctattggaaaagaagctcactgtgtcttcataggacagagagggctaggatgcctatgtatgaatttctccagattttttctgtgtatgttttccatgttgattctactgtgtatccgttctctgtaacaaaccttagtcatggtacaactacatgtttagtctgtaagaccttctagcaagtcaaacctgtcagtggtcctggggaccc

SEQ ID NO: 2391 - DNA, 309 bp, Homo sapiens
  source 1..309: mol_type = other DNA
ggccaagcgcggtggctcatgcctgtgatcccagcactttgggaggccgaggtgggtggatcacctgaggtcaggagttcaagaccagcctgaccaacatggagaaacaccatctcaactaaaaatacaaaattagcggagcgtggtggcgcatgcctgtaatcccagctactcaggggcctgagacaggagaattgcttgaacctgggaggtggaggttgcagtgagccaagatcgtgccattgcactccagcctgggcaacaagagtgaaactccccctcaaaaaaaaaaaaaaaaaaaaaaagaaa

SEQ ID NO: 2392 - DNA, 283 bp, Homo sapiens
  source 1..283: mol_type = other DNA
ccaggcaaggtggttcacacctgtaatctcaggtctttgggaggccaaggcaggaggattgcttgagctggaagtttgagaccagactacggaacatagggagaccttgtatctacaaaaaaaaaaaaaaagccacatatgctgaagtatgcctaaggtcctagctacttgggaggctgaggctgagactgcttgagtccaggaggtagaggctgcagtgagccatgaatgctccactgcactctagcctagacaacaaagcaagacctcgtctcaaaaaaaa

SEQ ID NO: 2393 - DNA, 366 bp, Homo sapiens
  source 1..366: mol_type = other DNA
cctattccaaattatcccttcatcattatcttcggtcttcttcatccatttcttcttcatccatttctcccttcaggatacaaaaatattcaagtttcctcaatctacaaaaaaaaaaaagttctcgtaagtgttgaactgaatcacctttctcccattcagggcaagctttctgaaaggactagctatcctcttcctcatttcctcaccttccacccatttctcaacacattctggtcctgctcctttgaagcagttctttccagagtcgtcaataacttcctaattgggaaatccgattacagattatttaatattctttatcttattccaacttggcaccatgtgaaattgttgaccactttc

SEQ ID NO: 2394 - DNA, 106 bp, Homo sapiens
  source 1..106: mol_type = other DNA
agttgttttggaaattttatgtaaaattaaaactatcagtattttacagatgttttaattagacattgttattaacaggaacagtgcagaaactagaatcaagcct

SEQ ID NO: 2395 - DNA, 86 bp, Homo sapiens
  source 1..86: mol_type = other DNA
catgggccgtatcttttgcatttctgtatcctagtattaagtacagtgcctaccacaggccaggttctcaatacttgaataaatga

SEQ ID NO: 2396 - DNA, 655 bp, Homo sapiens
  source 1..655: mol_type = other DNA
gtggctttgtaatgtgtcaccttggtgaggctatgtttcccggaactctcttccagtaagatgggccacaagagacattttgcttgataaccggagggcggaagtgaagcagcagcacattgtttttacacttggaaggttggtgctggggcaccaggcgttgttgcagttcacacgttgccatgtatctgctagatcacctcgttggtgtgggcagtagtcaggcctgcagccaggcctgcagctgctccaccttccccaggatcatcctttcagcttctctaattcctgggccagatgcatatttaactctgtgaggaagggcaccagcttcttctgcaggacacccacatcatcgaagctggaggtggtgagagactgacatgggttccaggccatcctcgtgggttccagctcgtgctcgtgggctccactgtgtcctcggtctcccacactttacatccatcttcccttcccgagtgcctgccctgcagacttcaagctccagcattagatgcaaagacaacagccttacagagactgtttaaccagctcccacaatggcatgcggtcagatccctataataaatcccttaaaatacatatatacataatctttatcttagtggttctgctcctctgattgtaccctaac

SEQ ID NO: 2397 - DNA, 177 bp, Homo sapiens
  source 1..177: mol_type = other DNA
agaggaagacattctatggtggacagaccctggcctgggggccaggagactgggatttcaagctcgtcctcacactaagcctgtgatcttaagcgagtgtctctgcctctctgggcctaattgcctttcctcagctgtcagttgaggctagttgggccagatggtttcggagctacc

SEQ ID NO: 2398 - DNA, 251 bp, Homo sapiens
  source 1..251: mol_type = other DNA
gcctggaggtgagataggtttccttcttgcttctcaacattgcttccaggtcatccccctcctcctctaaaccggcagctttaaatcttgctgtccgatacctctatcgctgacctcaccccgcttcatctctgcacaatttgctcctgacattcactccaatgccacttctgtcctagtggtaggtggttataagatcttcccagtaccctggcctctcagttccttttcttcttctcaaggatcttctt

SEQ ID NO: 2399 - DNA, 299 bp, Homo sapiens
  source 1..299: mol_type = other DNA
ggccaggcacggtagatcacgcctgtaatcccagcactttgggaggccgaggcgggcagatcaagaggtcaggagttcgagaccagcctgaccaacatagtgaaaccccgtctctactaaaaatacaaaaattagccgggcgtggtggcgggcgcctatagtcccagctacttgggaggctgaggcagaatggtgtgaacccgggaggcagaggttgcagtgagccaagtcgcgccactgcactccagcctgggtgacagagcgagactccgtctcaaaaaaaaaaaaaaaaaaaaaaa

SEQ ID NO: 2400 - DNA, 351 bp, Homo sapiens
  source 1..351: mol_type = other DNA
tttcttttaaatatgtcgaacctatttccaccctggggtctttgctttcgcttcctctttgaaatctgttcagtcttcacatagataaaaggttattcaggtcccatcttttcagatgggatgtcccctaccatccagtctgaagtgttcttcccaatcatctgctgttccataccctgttttattttcttcacagtgttcattgttatctgagttatttcatttgtttgcttatttgtctgcccctgcacctctgtgagaacagggactgtagctgttttgttttctactgtgtatgcagtgcctagaaagatccctagatactctgtagatatctgttaaatgagttaa

SEQ ID NO: 2401 - DNA, 82 bp, Homo sapiens
  source 1..82: mol_type = other DNA
agaacgtaagtgttcttgaagacatatattttgtcttactaatctgtttcttccaagcactactgtactaggcatacggtaa

SEQ ID NO: 2402 - DNA, 435 bp, Homo sapiens
  source 1..435: mol_type = other DNA
tgtgatggttaattttgtgtcaacttgagtgaaccaagggatgcccagatacctggtaaaacattatttccacgtgtgttggtgagggtgtttctggaagtcattgacatttctactggtagactgagtaaagaagatccaccctcactaatgtggatgggcatcagtccattcagtgccccatatgaaacaaaaaggcagaggaaggacaaaatcagcctctctgcttgttctgggacatctattttctcctgctcttggatatcagtacacttgcttctctggccattggacttgactgaattacacctccagctttcctgattctccagcttgcagatggcagatcgtgggtcttctcagcctccgtaatcatatgagccaattcctacaataaacctctctgtctctctcattctgtttctctggcaaact

SEQ ID NO: 2403 - DNA, 223 bp, Homo sapiens
  source 1..223: mol_type = other DNA
cagcctggacgatatagtgagacctcgtctctacaaaaaataaaaaaaaattagctgggcacagtgatgcacacctgcggtctcagctactcaggaggctgaggtgggaggctcacttgaatctaggaggtggaggctacagtgagatgtgatcaggccactgcactccagcctgggcaacacagccagactctgtctcttacaaaaaaaaaaaaaaaaaaaa

SEQ ID NO: 2404 - DNA, 293 bp, Homo sapiens
  source 1..293: mol_type = other DNA
ggccaggtgtggtggctaatgtctgtaatcccagtactttgggaggccaaggcgggcgaatcaccagaggtcaggagttcgagtccagcttggccaacatggtgaaacctcgtctctactaaaaatacaaaaattagccaggcatggtggcgggtgtctgtaatcccagctacttgggaggctgagacagaagaatcggctgaacccgggaggcagaggttgcagtgagctgagattgcgccattgcgccccagcctgagcgacaagagcaaaactccgtctccaaaaaaaaa

SEQ ID NO: 2405 - DNA, 223 bp, Homo sapiens
  source 1..223: mol_type = other DNA
tagagcgagcattagatttagagagcaaaatatttgggttctaatatgcaaagccacttaccagctatgagggcttcggcaaagaactgaatctgagctcagctccctcaactgtaaaactaggttattcggacctatgtggcctaccacacaggcttattgcaaggttcaaatgcagaaacatatgaaagtgctattatgaatacaacttagagcaatacaa

SEQ ID NO: 2406 - DNA, 2313 bp, Homo sapiens
  source 1..2313: mol_type = other DNA
aagtcagggtcattttataattatgaaggtatcaattcagcaagaggatgtgacaattgtaaatatatatgcacccaacactggagcatccagatatatgaaacaaatatcactggagccaaaaagagagacagaccccaatacaataatagttagggacttcacactccactttcagcattggaaagatcatctatatagaaaatcaacaaagaaagatcgaacttgatctacactacagaccaactgaacctaaaagacatgtacagaacatttttatccaacagctgcagaatacacatttttctcctcagcacacggaactttctcgaggctagaccatatgttaggtcccaaaacaagtctcaaataattttaaaaaattaaaattatatcaagtatcttttctgaccacaatggaataaaagtagaaatccataactagaggaactttgaaaaccacacaaatacatggaaattaaacatgctcctgaatggctactggtcatgaaaaaggaaattttaaaatttcctgaaacaaatgaaaatggaaacacaccatacccaaacctgtgatacagcaaaagcaatataaagaggaacatttatagcaataaacacctacatcaaaagtacagaaagacttcaaataaataacctaactagaaaagcaagagcaaaccaaaggcaaaattactagaaaaatttatgatcagagctgaaatttaaaaattgagactaaagaaaactacaaaacatcaatgaaagaaagtttttttttttaaaaaaataggtaaacaaggttgctgtttgaactcttgtgaaggtggcttgcactgccgtgaggttcccggccaagcaggacaggtttatttgtatctatcctgcttttttaaataataagaagaccatcgcagagggaaggcgaatccccataagtaaggctgttgaaaatcctacagctacagagattcaagatgtatgttcagaagttggacttaacgtatttcttgagaaaaattaaatgtactctagagaatggaatcgtgatgtccaatacagaggcagctcaaacaggtccagctcaaacaggaccagctcaaacggctccagctcaaacaggaagatggcggcctctgccttgtacagttcccatcatgtaagtcagtaatgttgtatgcagcagaaataatacctaaactaaaacgaaggacacaaaaaacaggaggaggtgaccaaagtcttcaacaaggagagggaagtaaaaaagggaaagggaagaaaaagaagtaacctagtgtcagcatcaagtttgtggtactactgtcagagacatgaatggaggcttcgaatttgtattggaggaaaacagaagctttttgtttgcgtcatttaactgagctgtgaacccttgtgcctctcctctttattatcgaagttgacagtgaaacaaatttacatcagaagtttgcatctcgctttcatgaagtataaaagaagtttttagtctttcagtgcagttatttggaagaacaaatatttttaaatggacaatggacggtacaataagttacttgaaataagttacttgtttcagataaatttcaattagatttgaaataaacattttgtcttttaagttaatgaaataaaatttgaaactgaaaaaaacaataggtaaacaaaattggcaaacctttagccatattaagaaaaaaagagagaaggcccaaatagacaaaaggagatattacaactgttaccacaggaattgaaaggatcatcacagactattatgagcaactatatgccaatgaattggaaaaagtagaagaaatggataaaagctctcagcaaactgcatatagaaagaatatacctcaacacaacacggaccatatttgacaaacccacagctaatataatactgaacagggaaaactgaaaacattccttaagatctagaacaaggaaaggatgtccagtttcaccacttctattcaacatagtactagaagtcttagccagagcaattaaataagagagaaataaaggacatccatattagaaaagcagatatcaagttatccttgtttcagatgacatgatattatatttagaaaaacctaaagattccaccaaaaaaactattagaactgtaaattcaataaaattgcaggatacaaaattaacttacaaaaatcagtagcatttctatatgccaacagtgaactgtctgtagaagaaaccaagaaagcaattccatttaccatagctacacataaaataaaagagccagacccatagtttgta

SEQ ID NO: 2407 - DNA, 916 bp, Homo sapiens
  source 1..916: mol_type = other DNA
cttagtgtcaaatagattagtttgggtgactacaaccctcaaaggagcagggagagacatatacgccaggagagagagatatgccaggtatggctttccttttctgacgacagtgcctttatcagcaccactctcagagatgattttgttgttgttaacacaggattccacataacattgtctcaggctgaataactcactttatctagcaaaggaggcgcagtagcatgcaaccattggatctaagttctcattgcctacgtgcattgcctacttgctcccagcctaatggagcaatggaaaaatctggtggaggcccgcagaggggcagctaggagttataccccgtgaggacagatcaccatccttcaggagaaagtgtccagcaaaatccagcaaccctcctacagtaccatgtcaccaatacatagaatacatgagttcaggaagcatgggatattaggggcccagttactatcactctcagaaccactagggattttctgcttcccacctcacagcttggtctgtgtaggctcaaagttcctagttcccaaagagaaactgctttaatcaaggcacacagcaagataaccattaaactgcagctgctttctgattacttcaggcttcttatgccataaaacccagaaacaaagaaaggattcaccatcctggcaactgatcatcaggaggaggtaaaatgggaaaagggaagaatacacttagcatccaggtgatccagtgggttatctctttctactcccttggtggattatgatggtaaatggacaagttcagcagccacagtgtgataagggctttgtgaacagggtttcagagacctaatgaggatctaggctgctgcaccaggtaaacagagatgcctgctgtgcgtgaaaggaatctagaatgg

SEQ ID NO: 2408 - DNA, 394 bp, Homo sapiens
  source 1..394: mol_type = other DNA
cctttcctatctgcatatgctggtcctcccatgaagaagtagaatttatttttcatgccgtaaatcttgactggtcttctaacttgtttatttcttggtctgggccttaagaggcattgaagcttccgggattgggagtaagctgccatggaaagaaactcaggctggactactgcatgatgagagatcacatcaaagagaacagtccagccagcccaacttgagacaccagacatgtgatggagccatcttggattcctcaccccagccaacaccatgtggagcagaggcaaaccctctccatggagttctgcctgaattgcagacttgtgaataataataaatggccattttaagccgttaagattttgagtggtttattatacactcatag

SEQ ID NO: 2409 - DNA, 67 bp, Homo sapiens
  source 1..67: mol_type = other DNA
ccgagatagcgccattgcactccagcctgggcgactgaataaaactctgtctcaaaaaaaaacaaaa

SEQ ID NO: 2410 - DNA, 261 bp, Homo sapiens
  source 1..261: mol_type = other DNA
ggctgggcatggtggcttatgcctgtaatcccagcactttgggaggctacgatgggtggatcacctgaggtcaggagttcaagaccagtctggccaacatggtgaaatgccgtctctactaaaaatacaaaaattagctgggcatgatggcgagtgtctgtaatcccagctactcaggaggctgaggcgggagaatcacttgaacctgggaggcagaggttgcagtgagctgagatcgcgctactgcattccagcctgggc

SEQ ID NO: 2411 - DNA, 2041 bp, Homo sapiens
  source 1..2041: mol_type = other DNA
ccaaagatggtggtttagaggctttcagtgtacctcagccacttggaaatagcaaggtagtacataaagattaactctgtgagctttaattccagaaggaaaacaagaacccacctaaattatgaaggacaccccagatccccaagaggagattgcaggcaaacagcccttgtgatggtatttggctgacaaaagtgagtgaagccccagcgtgggagagacacacagcctccctctgtgactcactttttcactggggatctgagcagcctaggccaggaaagaacccttttgtttctcccaaactctggagctaatttggggagaggattggaggcacccagaaggaaagacatcaggaaaagctgcaggcattttcccagacccatgagcaagtaggatgctatttttgataagcgtgcatacaaagtcattctttggtgatcttgcagcatgattcctcagacatttagtctcaggttgaagattggaatgccttctctgaagcaggatagaggcttccacagcaaaaattatggacaatgccccagcagaattgtgctctccccatcacaagcctggagtgggaggggagctgcaacagctgtggtttctcctggttgaagagacttgcagccagggccaatgtggctatgtggaaccagcatgtatatgtccttgctgggtggtccagactgctcccctgagattgtggtgcagtggagtcctctctgctgagtctccagtcagaactctagacattcagagtgcctgcttgcctggcccagcagcccgagctctctcacccttcctatgcagaaactgtggtgcaggaggccctctccacttcccacctaagcaggtcttcagccatgtggagcacccacttgcctggatgagcagcctgagctgctctaccattcttgtggagagatctgggttcagggggccctctttgcttcacatccaggcagattttcaggcacctggagcacctgcttgcctggttcagtagcctcagttacccagccttcctgtgcaggaggctctatctgcttcatgcccaggcagatcttcaggcatctggaactcccactctcctggatgtggagtttaggctgcgtccccctccccatgcagagaacttggcgccaaggaggtttctaactccagaactatgtacacctctgggcacttggtggcttcccactggattctcccttggcagtagtgtttgtgcctgccatcacaggacctgtaggtaggcctacccagtccagccctgtccatctttccaccacacccccaggactgagcagggagctcagaccactgtgcacctcaaagataagtccattgcatgaggcaacagagaactctctccagtaagcaaggataaagcatatatccgctcacattggctacaaccaccttttactcataagcaccatctactggcttgtaggtcaaaccgcacagcctaataaaaactcaccaaaagaagtgcataggactacagagaagcaaagccaaaagaccctacccaatattctcttcagtcacaccccctaagaaaggaaaaaaaatgcaaaagaaaagaaaaaatatacataatattacatgggaagaaagaaaaacaaaagttctacctacaaaaaaataattacaaaaattagaagttccagtgtctccagatgagaaggaaccagtgcatgaaatctggcaccataaaaaatctgaatgtagtgacaccaccaaaagattgcactagctctccaacaaaggtccttagccaaatggaaactcaaaaatgacagataaagaattcaaagaatagatagccaggaagttcactgaaagccaagacaaggttgaaaatcattacatagaaatttcttaatcagtccaggaaatgaaggaaaatataaacatgttaaaaagaaatcaatcagagcttctgaagttgaaaaactcaaagattttcaaaatacaagtgaaacctttatcaacggacttcactaagcagaagaaagaaatttag

SEQ ID NO: 2412 - DNA, 307 bp, Homo sapiens
  source 1..307: mol_type = other DNA
ccaggtgtggtggctcatgcctgtaatcccagcattttgggaggcccaggtgggcagatcaccaggtcaagagattgagaccagcctgaccaatgtggtgaaacgctgtcactactaaaaatacaaaaatgagccaagcatggtggcgtgcacctgtaatcccagctattcaggaggctgacgtaggagaatcacttgaacccggtaggcggaggttgcagtgagccgagatcagaccactgcactccagcctgggcaacaaagtgagactccatcccaaaaaaaaaaaaaaaaaaaaaaaaaagaa

SEQ ID NO: 2413 - DNA, 137 bp, Homo sapiens
  source 1..137: mol_type = other DNA
ctgcctttgagttgttccatgatcacttctgaataagcagtttgcctttataaaaacttgctgcctgactaaagattaacaggttatagtttaaatttgtaattaattctaccgtcttgcaataaagtgacaactga

SEQ ID NO: 2414 - DNA, 120 bp, Homo sapiens
  source 1..120: mol_type = other DNA
ggaagggtctctgttaatcctactctgctttagccagaatagcctagtattttatttctattttatatattgagatttcttctaacatttcctttgataaaaatcttctgctttttgaaa

SEQ ID NO: 2415 - DNA, 378 bp, Homo sapiens
  source 1..378: mol_type = other DNA
tgcccatcagccaacgagtggataaagaaaatgtgatatatatgcactatggaatactaagccataagaaggaatgaaataatggcatttgcagcaacctagatggagttggagaccattattctaagtgaagtaactcaagaatggaaaaccaaatattgtatgttctcactcgtaagtgggagctaagctgcgaagatgcaaaggcataagaatgatatagtggactttgaggactcaagggttgaaggatgagactacacattgggtacagtgtgcactgcttgggtgatgagtgcaccaaaatctcagaactcaccactgaagaacttccccatgtaaccaaaaaccacctgttccacagaaactatcgaaata

SEQ ID NO: 2416 - DNA, 300 bp, Homo sapiens
  source 1..300: mol_type = other DNA
gctgggcgcggtggctcacgcctgtaatcccagcactttgggaggccgaggcgggcagatcacaaggtcaggagatcgagactatcctggctaacacggtgaaactgcgtctctactaaaaatacaaaaaactagccaggcgtggtggtgggcacctgtagtcccagctactcgggaggctgaggcaggagaatggtgtgaacctgggaggcagagcttgcagtgagccgagatcgcgccactgcactccagcctgggcgacagagcgagactccgtctcaaaaaagaaaacaaaaaaaa

SEQ ID NO: 2417 - DNA, 308 bp, Homo sapiens
  source 1..308: mol_type = other DNA
gccgggcgcggtggctcaagcctgtaatcccagcattttgggaggccgaggtgagtggatcatgaggtcaggagattgagaccatcctggctaacatggtgaaaccccgtctctaccaaaaatacaaaaaattagctgggcgaggtggcaggagcctgtagtcccagctactcgggaggctgaggcaggagaatggtgtgaacccaggaggcggagcttgcagtgagctgagattgcgccactgcactccagcctgggcaacagagtgagactccgtctcaaaaaaaaaaaaaaaaaaaaaaaaaaaa

SEQ ID NO: 2418 - DNA, 821 bp, Homo sapiens
  source 1..821: mol_type = other DNA
aaaataagaaaaggtcataagcagacacttctcaaaagaagaaatacaagcagccaacaaacatatgaaaaaatgttcatcgtaactaatgcccagagaaatgcaaatcaaaaccaccatgagatatcatctcacaccagacagaatggctattattaaaaggtcaaatagtaacggatgcttgcaaggctgcagagaaaaggaaatgcttacacactgtaagttagttcagccactgtggaaagcagtttggagatttatcaaataactaaaacagagctactattcaagccagaaattccattactgggtatatatccaaaagaaaataaatcattttaccaaaaagacaagattctccatgttcatcacagaattatttacaatagcaaagatacagaatcagcctaggtgcccatcatcaatagtggactgagtaaagaaaatatggtacttatacatcatggaatactacacagccatgaaaagaatgaaatcatgttctttgcagcaacatggatgtaggtggaagccataaccctaaaataatgaatgcaggacagaaaaccaaataccacatgttctcacttataagtgggagataaacattgagcacacagggacataaagctgagaacagcagacactgcagacttctagagaagagaggaaaggagtgggggatgggtttaaaaactacctcttgggtactgtactcactgcctgggtgacaggatcatttgtaccccaaacctcagcatcacgtcatatacccatgtaacaaacctacacaaccccctgtatctaaaataaaagttgaa

SEQ ID NO: 2419 - DNA, 198 bp, Homo sapiens
  source 1..198: mol_type = other DNA
cgggcgggcggccaggcctgtagtctcagcactttgggaggctcagcacttcgggaggctgtggcgggcggatcacctgagcctgggagttggagaccagcctgcgcaacgtagcaagaccctatctctaaaacagattcattaatacttagccaggcgcggtggctgaggtcccagctactcggcaggcccaggctg

SEQ ID NO: 2420 - DNA, 364 bp, Homo sapiens
  source 1..364: mol_type = other DNA
ctggacaattcgtacaaatgatgtgacttacaacgaacccccgattttcttccggggttctgtagcctcctgtgtgcctatgggaccaatcccccaaaccacacgcaggagtcaggctcaggcaagcatcctggtggacagcacctcacacatcatcacagctcactgctggaggagtcaggaacatccctcctgactgccctaggagagggtgctcacaactcacacaggcttcctgcagcctttgccttgtgccttttccccttacagtgtccccttaggaagactgtagccatgagcagaatgacttctgaggcctgtgagttctttctgaaactcactaaacctgagggtggtcttggag

SEQ ID NO: 2421 - DNA, 160 bp, Homo sapiens
  source 1..160: mol_type = other DNA
agaagacactgagctagagtcaacagaccagatatctagttccagctctgcctctacctacctgtgagacacggggaaagttctcttaaccttcgtaaggcctcagatttctcaaccatagaacaaaggggctgaacaaaatgaattctaaagagcattc

SEQ ID NO: 2422 - DNA, 271 bp, Homo sapiens
  source 1..271: mol_type = other DNA
cacgcctgtaatcccagcactttgggaggccgaggtgaaaggatcacttgagcccaggaattggagaccagcgtgggcaacttagcgagactccatctctacaaaatgtggtgacacatgcctgtagtcccagctactcaggaggctggggaaggaagatcacttaaggccatgagtttgaggctacagagagctatgattgcaccactgcactccagcctgggcaacaaagcaagaccctgtctcttgaaaaaaaaaaaaaaattaaaaa

SEQ ID NO: 2423 - DNA, 119 bp, Homo sapiens
  source 1..119: mol_type = other DNA
gcctggcatggtgatgtctgtaatcccagcagtttgcaaactgaggcaagagaatcgcttgaggccaggagtttgaggccagctagagtgacatagcaagactccgatgctacaaaaaa

SEQ ID NO: 2424 - DNA, 288 bp, Homo sapiens
  source 1..288: mol_type = other DNA
ggccaggcgtggtgactcacgtctgtaatcccagcactttgggagggcaaggcaagagcttgagcttgagcctagacgttaaagaccagcctgggcaacacagcaagacccatctctacaagaaatttaaaaactagccaggcgtggtggtgcgcgcctgtagtcccagctacttgggaggctgagccctggaggtcgaggctacagtgagctatgatcacaccattgcacttcagcctgggcgacacagcgagaccctgtctcaagaaagaaaagaaaaagagacaa

SEQ ID NO: 2425 - DNA, 84 bp, Homo sapiens
  source 1..84: mol_type = other DNA
ctcgcctgcctgggcctcagtttccacatctgcacaatgggggtgaccatccctgccctgctggctgccaggagcggctgtgag

SEQ ID NO: 2426 - DNA, 1225 bp, Homo sapiens
  source 1..1225: mol_type = other DNA
tgaatctgtaaaactactagaagaaaacatattgaaaatacttcaggacattggtttaggcaaagattttatggctaatacctcaaagcacagacaacaaagataaaaatagacaaatgagactatcttacactaaaaagtagctgtgcaaagtaaagggaacaacaagagtgcagagaaaacctgttgaatatgagagaatatttgcaaactatgcgacaagggactaatatccaaatatacaaggaactcaaacatctcaacagcaaaaaatataaataatcccattaaagtgggaaaaggatgtgaacagacagttctcaaaagaagacatgcaaatggccaaaaagtatatggaaatatgttcaacatcactaatgattaggaaaatgcaaattgaaaccacaatgagatactctacttagaattgttcttactaaaaaagataaaaaacaacaaatgctgatgaggatgtggagaaaagaaaactttcactgttggtgaaagtataaattagaacaactactgtggaaaacagtatgtagatttctcaaaaacctaaaaatagaaccaccacatgatccagcaaaccaagtataaccacaggaaaagaaatcagtatatcaaagagatacttgcacttgcatatttatcacagcactattcatgataacaaagatatggaattaacctaagcatccatcagtggacacagggataaagaaaatgtttatgtacacagtggaatactatttggccataaaaaagagtaaaatgttattgctaacaacatggatggaacttgaggtcattatggtaagtgaaataagccaggcacagaaagacaaataccacatgttctcacttatatgtgggaggtgaaaaacttcacctcatggagatagggaatagaataagttatccggggctgagaaggggaaatgaagagaaattggtgaatatgtacaaatttccatttagatcaaaggaataagttctgatgttagaaagcatactagagtgaactatagttagcaaaaatatattgcatatttcaaagtagttggaagagaggacttgaaatgttaccaacacatagaagtggtaaatactcaagatcatggataccccaaatacgctgacttgaccattacacattctatgcatgcaagaaatgctcatgtgtaccttatatatatgtaaaatatgtatcaataaaagaaaa

SEQ ID NO: 2427 - DNA, 131 bp, Homo sapiens
  source 1..131: mol_type = other DNA
ggccgggcacggtggcgcacgcctgtaatcccagcactttgggaggccaagacgggcagatcacgaggtcagcagattgagaccatcctggctaacacggtgaaaccccgtctctactaaaaatacaaaaa

SEQ ID NO: 2428 - DNA, 1215 bp, Homo sapiens
  source 1..1215: mol_type = other DNA
gatgacataatcttaatatttgtaaaaacctaaagactctacaggaaaactgtaagaataaacgagttcagtaaagttgcaggatacaaaatcaacaaaaatcagtagcatttctatatgccaacagtgaacaatgtgaaaaatacatttaaaaagtaaccccatttataatagccacacataaaattaaatacctaggaattaaccaaagaagtgagagctctttataatgaaaactataaaacactgataaaggaaattgaagaggataccaaaaaaatggaaaaacattccatgtttatggattgtaagaatcaatattgttaaaatgtccatttacccaaagcaatctgcagattcaatgcaatccccatcaaaataccaaggatattcttcacagaaatacaaaaaacaatcctaaaattgatatggaaccccaaaagacacagaatagccaaagctatcctaagcaaaaagaacaaaactggaagaatcacattaccagacttcaaattatattacagagctatagtaaccaaaacagcatggtactggcataaagacatacacatagagcaacagaacagaagggagaacccagaaacaaatccacacaactagagtgaactcattttcaacaaaggtgtgaagaatacacactggggaaaagacagtttcttcaataaatggtactgggaactggatatccatatgcaaaagaatgaaactagatctttatctcttgccaaatacaaaaaccagatcaaaatggattaaagacttaaattgaagacctcaaatcaggaaactgctacaagaaaacattgtggaaaatctccaggacgctggtccaggcaaaaatttcttgagcaatacccaacaagcacaggcaagcaaagcaaaaatggacaaatgggatcacatcaaattaaaaagcttccgcacagcaaaggatacaatcaacaaagtggacacaacgcaaagaatgggagaaaatatttgcaaactacccatctgtcaagggattaatataaccagaatatataaggagctcaaacgctacaggaaaaaaagtctaataatccaatcaaaaaatgcacgaaagatttgaatagacagttctcaaaacaagacatacgaatggcgaacaggcatataaaaaggtgtttatatgaaaaagtgatcatcagagaaatgcaaatcaaaactacaatg

SEQ ID NO: 2429 - DNA, 70 bp, Homo sapiens
  source 1..70: mol_type = other DNA
tgccacaggccgccatggcatcagatgaaggcaaactttttgttggagggctgagttttgacaccaatga

SEQ ID NO: 2430 - DNA, 282 bp, Homo sapiens
  source 1..282: mol_type = other DNA
gccggggacggtggctcacgcctgtaatcccagcactttgggaggccaaggcgggcggatcacgaggccaggagatcaagaccatcctggctaacacggtaaaaccccatctctactaaaaatacaaacaattagccgggcgtggtggtgggcgcctgtagtcccagctacttgggaggctgaggcaggagaatggcataaacccaggaggccgagctgacagtgagctgagatccggccaacagagcgagactctgtctcaaaaaaaaaaaaaaaaaaaaa

SEQ ID NO: 2431 - DNA, 279 bp, Homo sapiens
  source 1..279: mol_type = other DNA
ctgggcatggtcacacctgtgatcccaacactgggagactaaggcagtaggattgcttgatgccaggactactctggtcaacctagtgagaccctgtctctacaaaaaataaaaacattttctaagtgtggtagcacaccctgtagtcccatctacatgggaggctgaggcaggaggattgcctgagcccaggagttcaaggctacagtgaaccaagatcacgtgatggcagtccagcatgggtgacagtgagactgtatcaaaaaaaaaaaaaaaaaa

SEQ ID NO: 2432 - DNA, 312 bp, Homo sapiens
  source 1..312: mol_type = other DNA
ggctgggcgcagtggctcatgcctgtaatcccaacactttgagaggctaaagtgggtggatcacctggggccaggagttcaagaccagcctggccaacaagttgaaaccccatctctactaaaaatacaaaaattagctgggtggggtggtgtgcacctgtaatcccagttacttgggaggctgagacatgagaatcacttgaacctgggaggtggaggatgcagtgagctgagattgagccattgcactccagcctgggcaacagagcgagactcttgtctcaagaagaagaaaaaaagaaaaagaaaaag

SEQ ID NO: 2433 - DNA, 145 bp, Homo sapiens
  source 1..145: mol_type = other DNA
ggaagttaatttttatggttgtgtatgtgttgcttgtcactagaatgatggctgtgtggggcaggtttttgtctgtgttattccttgctgaatgcccaggcctggcacagggtgagtactccatagatgaatggatgaacaaatg

SEQ ID NO: 2434 - DNA, 195 bp, Homo sapiens
  source 1..195: mol_type = other DNA
tggtatgagcaggggccaaagagggaggttgcagctaagctcacaccctcaggtcctagcagtgtggcttcgtggccattgctcaacctctggaacctgcgtttccccatcgtgaaaataatggaaacattgccgcccaagtctttaaggatgatgacagtaattagcatttgacaactagttgcctggtatata

SEQ ID NO: 2435 - DNA, 239 bp, Homo sapiens
  source 1..239: mol_type = other DNA
tgcatccattcgtctgtcccctaacacaccctctcatctcacctggtccatctccatgatcacttacctaaactagtgtggttgcctcctgtgggtttcccagcttccaccctcaccccctacgacttcttgtccagacagcagccagaatggtcctgtaaaacataagtcatgtcgcatttgtctctgctctgacccctccccgggctctgacctcgctggaaagaaaaatcagtgtc

SEQ ID NO: 2436 - DNA, 516 bp, Homo sapiens
  source 1..516: mol_type = other DNA
gtgacagtttgaaatgtctaccaattctgatattcttcccttcaaaacacagaacctcattctcctccctctgcacgtgggctgggcctggggggcttgcttttgataaacaggctgtggcggaagtgatcacgtgagacttctcagggtggctcatagaagcactgtggcttgctccttcctctcccttggttcacctgctctggggaaggcagaggccatgccgtgaggatgctcaagcagcttcgtgtaggggcccccatgggaaggaactgtggctgtcaccgacagccacgtgagggcactggcttggaagtggctccagccccagttgagccttcctcagacgaagtggccttggctgatgtcttaactgcaacctcatgagagactctgggccacaaccacccagatacatcactcccaaatccccgactgacacagactgtgagagagtgaatgttcgttgctttaagccactacgtgtgggtgacttgttaaggcagcaacggatga

SEQ ID NO: 2437 - DNA, 288 bp, Homo sapiens
  source 1..288: mol_type = other DNA
gccgggagcgttggctttcgcctgtaatcccaacactttgggaggccaggacagatcacttgaggtcaggagttcgagaccagcccagccaacatggcgaaaccatgtctctactaaaaatacaaaaattatggtgacgcctgcctgtagtcccagctactcgggaggctgaggcaggaggatcgcttgaacccaggaagtggagactgcagtgagccgatatcgcaccacagcgctccagcctggtcgacagagtgagactccatctcaagaaaaaataaaaataaa

SEQ ID NO: 2438 - DNA, 145 bp, Homo sapiens
  source 1..145: mol_type = other DNA
aggaatgccaaacaggatctgtgtgatgtgtcaactctgagtaaatacaagaggctgctaggagcccccagctgaggattgagaggcaggctgtgtctggttccatttcaaagaatgctgtgatgcattagcagcgtctgctatg

SEQ ID NO: 2439 - DNA, 315 bp, Homo sapiens
  source 1..315: mol_type = other DNA
gctgggtgcagtggctcacatctataatcccagcactttgggaggccgaggtgggtggatcatttgaggtaaggagttaagagaccagcctggccaacatggtgaaaccccacctctactaagaatacaaaaattagccgggcatggtggtgggcacctgtattcccagctacttgggaggtagaggcaggagaattgcatgaacctgggaggcagaggttgcagtgagccaagatcacaccaccacactccagcctgggtgacagagcgagactccatcacaaatataaaataaaataaaataaatagaaaaaa

SEQ ID NO: 2440 - DNA, 220 bp, Homo sapiens
  source 1..220: mol_type = other DNA
gaggtcaagtgcagagcatcttcagccaacctggacagtgagggagtagaaggatgcttctccctggactcactgctgtggcctaagcaggaaccgggatattcaagagcactgcagaggaagccgtgacgaggcaggttcacacagctgtacaggaatagtcttccacagcgacaccttgtaatagccaggagcaacagcaggaatgcgctcatcagac

SEQ ID NO: 2441 - DNA, 204 bp, Homo sapiens
  source 1..204: mol_type = other DNA
gactggcctgcacctcttgtcgcttgctggtgctgtgccctctgctgggaatgccatttttgccttctacgaaactcctattcatcccgcaaagccccagccacaatgctcctgtgctgggaagccttctctgatgccccagggcagaggctggagagctcccccagtccccacacctggttgtccttcttgatgacactctgg

SEQ ID NO: 2442 - DNA, 165 bp, Homo sapiens
  source 1..165: mol_type = other DNA
catttcttggtatctctcagcttttcctcttgcagctccccctaccaggggtcgctttctcctggattgcaaatgcctcttcagtttggactcagctctgacagcccctcctccaggaaggccttccaggacttcctcctctgggtcctctagctctgaccctac

SEQ ID NO: 2443 - DNA, 293 bp, Homo sapiens
  source 1..293: mol_type = other DNA
caagtggaactttgaacatttattacacgtttaataatatttcaaaattattgataattcttttggatgtgataagctttgtaattgtcttttaatgagctctcatcttggagagatacattctgaaatatttacagaagaaataatccgatgcctgagatcagcttcaaaagaactcaggatggggcagggacgggttgtaggtagtcggtagtcagggtactgggtacacggatgttctttgtactgttctttggtctgttgcgcaggttcgaaatgcttcctaattaaaa

SEQ ID NO: 2444 - DNA, 232 bp, Homo sapiens
  source 1..232: mol_type = other DNA
ccccactcattcagacttttccttagatgtctcctttaggaagccctttgacccaggctgggtcagaagccctctccgggcttccccggcgccctgcgtgtccttattaggactctgattgcatgtgttggctcttctctgggagtcccatgcaggcagaaagctcatttgtgccacctctttccccagcatcgcacacgtattaggtgcccagtacatatttattgaatga

SEQ ID NO: 2445 - DNA, 302 bp, Homo sapiens
  source 1..302: mol_type = other DNA
gccaggcacggtggctcatgcctgtaatcccagcactttgggaggccaagacgggcggatcttttgaggtcgggagttggaggccagcctggccaaaatggcaaaaccccgcatctactaaaatacaaaaattagccgggcgtggtggcggccgcctgtaatcccagctacttgggaggctgaggcgtgagaatctcttgaacccaggagatggaggttgcagtgagcagagatcgtgccactgcactccagcctgggtaacagagggagactcctccgtctcaaaaaaataaataaataaa

SEQ ID NO: 2446 - DNA, 138 bp, Homo sapiens
  source 1..138: mol_type = other DNA
gctgggcgcagtggctcccacctgtaatctcagcccttcccgaggctgaggtggaaggattgctcgaggccaggtgttcgagaccagcctgggcaacatagcaagaccctgtctctatttatattgaaaaataaaaat

SEQ ID NO: 2447 - DNA, 182 bp, Homo sapiens
  source 1..182: mol_type = other DNA
gagggcgatttggtaccacccctttaggggcctaaatacagccctcgcacttctgcaccaaggaatttaacctaagaaaatagtccgacttgggcaaaaaacggtttgtacaagcaatagtcaagctagcattgttcgttataaaagacagcaaaaaccctaaatttctacaggaaagggga

SEQ ID NO: 2448 - DNA, 207 bp, Homo sapiens
  source 1..207: mol_type = other DNA
cttgactcatgctcaaaggacagcgcaatctaacaccctcaaaaggaggctcctaacgccgcatctgccagaacccatgtgaccctctgccccaatcccatctcagtcaataccagctcgagccaaaagtcttgagtcgtctttgattcttttatttctgtttcatctacacccaaggcgaatctgatgggttctcccttccaaaca

SEQ ID NO: 2449 - DNA, 159 bp, Homo sapiens
  source 1..159: mol_type = other DNA
ctgacacaggtgggccgggtgagggggagagtggagggaaccgatgagactgggcccaagtcttctcctgggctcactctgggatcttgggcaggtcccctatcttcccatctgcaggatgggattgtaggatgagttgagactgaagcccctttaagc

SEQ ID NO: 2450 - DNA, 312 bp, Homo sapiens
  source 1..312: mol_type = other DNA
ggctgggcgcggtggctgacacctattatcccagcactttgggaggccaaggcgggtggatcacttgaggtcaggagttcgagaccagcctggccaacatggtgaaaccccatctgtactaaaaatataaaaattagctgggcgtggtggcaggcaactgtaatcccagctatttgggaggctgaggcaggagaactgcttgaacacgggaggcagaggttgcagtgagccgagatcacaccactgcactccagcctgggcgacagagtgaaactcttgtctcaaaagagaaaaaacaaaacaaaacaaaac

SEQ ID NO: 2451 - DNA, 360 bp, Homo sapiens
  source 1..360: mol_type = other DNA
cctgccatctccctggccccatctcccccagctggccggctccagccacagaagccttctcggtgcttctcgaacactcccagggatcccagccccagagcgtctgccctcaccactgccccacatggaactccgtctgcccccggatcgtctctgtctgcatgtaactcatgccacctcctaggaggggccccgcagtgttcttcacagcgcatctgacatgctcttgtctgccatgtttacctggttgtcgtatgtctccttgtgagcctgtctgtctcggtcactgctatgtccccagtgcccagcccagggccaggcacacagcagagcgcaggacctcggtattaagtgactgaa

SEQ ID NO: 2452 - DNA, 131 bp, Homo sapiens
  source 1..131: mol_type = other DNA
ggcttaggattgggcacagccttggttcgaatcccggcgcctcctcaagctacagggcggcgcgatcttggctacgccttggcctgaacgtcctcacctgtaacttgggacgagaaccgccactccctcgc

SEQ ID NO: 2453 - DNA, 254 bp, Homo sapiens
  source 1..254: mol_type = other DNA
gagagaaagtgtaagcagagccagagtaaggatttggtccagaaaacaggaccaaatccttattccaaatccttactcctgtcgtggttgtgacttcaagccagtacctttcctttatatctgagcctcagtttcactgtgtgtaaaatgggaaagtaacagtttctaagtcaatgggctattgagaagattcaaggagattgtatgtaagtctttagcatggtgtctacttcttagttgtcaatggtcattat

SEQ ID NO: 2454 - DNA, 496 bp, Homo sapiens
  source 1..496: mol_type = other DNA
aggcctgcagaccttggcctttactacggtacctgaagtggttcaatgactcagtttcagttacctgagccacagcttaaggtcagttctgcctatatagaaacccacacagttaacctgaggaaatgctctctggtactcactgaaagccacactcatccacatcctgatacaaggcccaccatatgcagacctgactgccaaaacatgccctagtgtctgccgtacagagtgaagtcctgaaggatatttagtctgtccaaaactaaaatgaagatttcaactccccaaccccctctaacaagccagctaaaggtggactatagtgcagacccagcaaccttgtgaccaggctaaaacccctcatcactacaaattcagagggcatctcatcaccctaagggcccaacgaaagatctttaccttctaacatcagtttatgaaaacttgaaaaggtgtttgctccatcaaattcagacaccagtacaaaactata

SEQ ID NO: 2455 - DNA, 294 bp, Homo sapiens
  source 1..294: mol_type = other DNA
gccgggtgcagtagctcatgcctgtaatcccagcacttttggaggccaaggtaggcggatcacctgaagtcaggagtttgagaccagcctggccaacatggtgaaatcttgtctctactaaaactacaataatttcctgggcgtggtggcgcacacctgtaatcccagctacttgggaggctgaagcaggagaatcacttgaacccaggaggtggaggatgcagtgagccgagattgtgccactggactccagtctgggcgacagtgggagactccgttcaaaaaaaataaaaa

SEQ ID NO: 2456 - DNA, 119 bp, Homo sapiens
  source 1..119: mol_type = other DNA
gctgggtgcggtggctcacccctgtgattccagcactttgggaggccgaggatggaggatcactggaggccaggagttcagcgagacccctgtctctagtatgaccaaaaaaaaaaaaa

SEQ ID NO: 2457 - DNA, 2363 bp, Homo sapiens
  source 1..2363: mol_type = other DNA
ctccagcttaactttgtaacaattccaaccaaacgtgaagttttcttgccagaactcagaggagggcgtgaatccaatgtgcagacttgacaggtggaaaggtgtaaaagtcctgcttgctctctttgccaggaggctggtagcctggggcaagttctcagccctgctcacccactccctgaaaactaacctggtgctgtcggggggagaggcatcatgggagctagactggccttttgggttgtgtgggagttgggtgaggcctgtgactgtctgctttttcccactttcctgacaacgtgcatcaccagcagaggcagccataatcctcctgggaacataactccattgacctgggaaccacacctcatcccaccacagcagccactgcaagcacctccaaaggagagtctcagctcagacttgcctaaccctgcccccacctgatggtccttccctacccactctggtagacaaagacaaaattcatattctcttgaaagttctagggtcctgtccagtagctgatcctccctatactaccacagctgatgctctcttgaaggtgccacctcttggcaggaggccaaccagcaaaaaactagttcattaaacaattacaattaaggatgcaacagagtcaatttcactcctctgcaacttccaccacagcaggtgctggtgtccatggctgagagacctgaagatgattcacatcacaggactctgtgcagacaccctcaagtaccagcccagagactaatagacctgcgtccagaagagaaataacaatcactatagttcagctcttaggaagctacatccctagaaaaagggttagggtattacatcgagggagcaccctgtgggacaaaagaatctatacagcagccttaagcccccagatctcccctctcacacagtctacccaaatgagaaagaaccagaaaaacaattctggtaatatgaaaaaacaatgttctttagcaccacccaaaaatcatgcaagtttaccagcaatgaatccaaaccaagaagaaatccatgtagtgtctaaaaaaaaatttagaaagtcaattattaaactaatcaagtaggtaccatagaaatgtaaagtccaatttatggaaatcaatgaataatacaagatatgaggggagaaatcttcagtgaaaaaaatagaataaataaaaaacaataacaacttcaggaaataaaaacacacttagagaaatgcaaaatgtactgaagagtctcagtaatagagttgaacaactagaagaaagaaattccgagctccaaaacaagatttttgaattaacccaatcgaacaaaggcaaacagaaagaataaaaaaatcagcaaagcctccaagaagtttggaattatgttaaattaccaaacctaaaaataatttgcattcctcaggaagaagagaaatctaaaagttcagaaagcatatttgggaaagtaattgaggtaaacttttctttcttggctagagacctagacattcaaatacaagaagctcaaaaacacctgggacattcattacaaaatgaccactgcctagacaaattgttatcaggttatctaaagtcaaggcaaaggaaagaatgttaagagctgtgaggcaaaagcaccaggtaacctaaaaatatacaaaataaaaacctatcagattaacagcaaaaaccctacaagcaagaagggattgggaccctattttcagcctccttaagcaaaccaactatcagtgaagaactttgtatccaggaaaactaagcttcataattgaaggaaaaaatgtctttccatacaaacaaatgctgagagaattcaccgctaccaagccagcactacaaaaactgctaaaaggaactctaagaagtcctggaaaaatatcaaaacaggacctctttaaagcataaatctcacagggcctataaaatatgaatacaacaaaatgttttataaaaacaaagtattcaagcaacaaatagcatgataaataaaacagtacctcacatctcaatagtaacattgaatgtaaatggcctaaatgttccacttgaaagatatagaattgcagaatagataagaattcaccaaccaagtatcttctgccttcaagaaactcatctaacacactagggttaaggtaaaaatgtgaaaaaaaaaatccatgcaaatggataccaaaaatgagcagaagtagatattcatatatcagacaaacacactttaaaacaacagcagttaagaaaagacaaagtgggatattatataatgataaaaaccctgtcaaacagaaaaatattacagttctaaatatataagcacctaacactgaagttcccaaa

SEQ ID NO: 2458 - DNA, 1505 bp, Homo sapiens
  source 1..1505: mol_type = other DNA
tcctgaatgagctttgaatcaacaacaaaattaaggtggaaatttaaaaacactttgatttgaatgacaataatgtcacaacttatgaatacctctgggatacagcaaaagtcgtgctaagagaaagttgatagcaataaatgcctacatcaaaaagtctaaaatggcaaaaacagactacataaggttacacctcaaaaatctagagaagcaaaaacaaatcaaatccaaatgcagcagcacagaaaaaataacaaagagaaaaactaactgaaattgaaacaaaaaaatacaagaaaataaatgaaacaaaaagctggttgtttacaaagttgaacaaaattgatagaccattactagcaagattaaccaaaaaaagcagagagaagatctaaataagctcaattacaaacaaaatggaagatttacagacaataccacagaaatacaaaagattttgctaccatgaatatatttacatgtacaaattagaaaacctagagaagatgcataaattcctggaaatacacaatccttttagattaaacctggaagaaacagaaactctgaacagaccaataagaggtagtgagattgaaatagtaataaaaaattgctaaccaaataagtccaggagtacatgaattcacagatatattttatcatcagacattcaaagaagaattgttaccaatcttactgaaactattccaaaagataaaaaggtaatcttctctaaatcattccatcaagccaatatcaccctaatccccaaaccagaaaaaggcatgacaaaaaaacaaaaaaagtaaatatttctgatgaacatagatgataaaattatcagcaaattcctagctaaccaaatacaacagcatatcaaaaagataatacaccatgatcaagtgcattttataccagaaatgaagggatggtttaacatatgcaagtaaataaatgtgatataccacataaacagaattaaaaacaaaaatcacatgattatctcaataggctcagaaaaaaatctgacaaaatccagcatcacttcagcattaaaacccttagcaaaactggcagagagaggacatagcttaaggtaacaaaagccatttatgacaaacccacagcccaccttatactgaatgggaaaaatttgaaagcattacccctgagagctagaacaagacaaggatgttcactttcaccacttctattcgacatagtactggaattcttagccagagcattcaaacaagagaaagaaataaagggcatccaaattggaaaagaggaagtcaaactgtgactgttcactgatgatgtgattgtatacctaaaagacactaaagactcatccaaaaagcccctagatctgataaatgaattcagtgaagtttcaggatacaaaatcaatgtacaaaattcagtagcactgctatgcacaaatagcaacccaaactaggaatcaaatcaagaactcaacccctcttacaacagctgaa

SEQ ID NO: 2459 - DNA, 302 bp, Homo sapiens
  source 1..302: mol_type = other DNA
ggctgggcacgatggctcatgcctgtaatcccagcactttggaaggctgaggtgggcagatcacgatgtcaggagatcgagactatcctggctaacacagtgaaaccctttctctactaaaaataaaaaaataaaaatttagctgggcgtggtggtgcacatctgtagtcccagctactcaggaggctgaggcaggagaatcacttgaacccgggaggtggaagttgctgtgagccgagatggtgccatgcactccagcctgggcgacagagcaagactccatctcaaaaaaagaaaaaaaa

SEQ ID NO: 2460 - DNA, 651 bp, Homo sapiens
  source 1..651: mol_type = other DNA
ggtgggaaattaaagaaaataaaattaaattaaaaagagaaagaaacaaggtttcctgtattaggctgacttatcctagaggcagtaacaggcacagcccacatccaggaaaagttttgataacactatttaagaagccagggctggaaagaatgtgctctggagactctcccagcattccctcaacatagggagaagagaaacaaattttcctttctcttatgattcctgtttttcatttaagcagcacattgaaggtcatgagatgcctgagcaggcctggattgcagccacctaggcaccatagtgaaggttataagataagcccatgcaaggcactagagcaagcctaggtaacagccatctgggccacatagtaagagtcatatgtaagtctgagttataaacctgtcatagtatgattaactgcttttgttctgtttctgtatccttgctttcacatcactacactttgtgccactgtaggcttgtttcaagttagcccaccctctttagaagtgtatgtaaaagttaaatgctgtctttgtccttggcccagtctctggatgttaatccactgggtctgagtgcactcaataaaatcctccttttctacctatcggtctttccagtctcctaattcccacaaca

SEQ ID NO: 2461 - DNA, 328 bp, Homo sapiens
  source 1..328: mol_type = other DNA
agcctcacaggtgtgctgaatcttgacctgagagtcaccaatccatctgtggaccagattcacctataagagtcaattttgcaattttccactgcctccaggtgtgacattcagagcttcagaagtaggttatgtttatgttaagggatgacaatatttactgttggctggttgcgcatatgagtataacaatgtcacctgtgtgctgggccatgtaagggcactcagtgtattacccgagggctttatacaatatacaggagagtcaaatccactctgagatctttgtgattgtataaaaccatgatcgtacctgcggccctaggcc

SEQ ID NO: 2462 - DNA, 167 bp, Homo sapiens
  source 1..167: mol_type = other DNA
ggccgggtgtggcggctcatgcctgtgatccccgctacttgggaagctgaggcaggaggatcacttgagtccagaaggtcaaggtcacagtgagctgtggcaccactgcactctagcctgggcaacacagtgaaaccctgacccaaaaaccaaaaaccaaaacaaaa

SEQ ID NO: 2463 - DNA, 230 bp, Homo sapiens
  source 1..230: mol_type = other DNA
ataataaatgtcaaatataacaaaaaatgcacaggtattaacatactgaatagggaaatgctgtaagattttactctaagagctaaaacaagtcaaggatgtgcactttcttcagtcttactaaacatagtactaaatgtccaagacatagaaaataaagaataaaatcaaaggcatccagattggaaaaaaaggagttaaattatcattgtatgataatcttttatctc

SEQ ID NO: 2464 - DNA, 249 bp, Homo sapiens
  source 1..249: mol_type = other DNA
ggctgggtgcagtggctcacgcctgtaatgccagcactttgggcactttgggaggccaaggcgggtggatcacctgaggtcaggagttcgggaccagcctggccaaaacggcgaaacctcgtctctactaaaaaatactaaaattagccagggaaggtggcaggcacctgtagtcccagctacttgggatgatgaggcaggagaatcgcttgaacccaggaggcggaggttgcagtgagttgagattgc

SEQ ID NO: 2465 - DNA, 284 bp, Homo sapiens
  source 1..284: mol_type = other DNA
tcacacctgtaatcccactactttgggaggccgaggcgggcggatcacgaggtcaggagatggagaccatcctggctaacacagtgaaaccccttctctactaaaaaatacaaaaaattagccgggcgtggtggcgggcgcctgtagtcccagctatgcgagaggctgaggcaggagaatggcgtgaacccgggaggcggagcttgcagtgagccgagatcacgccactgcactcaagcctgggcgacagagcgagactccgtctcaaaaaaaaaaaaaagaaa

SEQ ID NO: 2466 - DNA, 943 bp, Homo sapiens
  source 1..943: mol_type = other DNA
agaaaatttttattttaatgatatttcccaaacactgtctggaattaccagatatgatagaaacatataaggtgccaaccaggatctactctagagtgggcttaccctctcaggcttccagtcactcccaaatttgctgccaagtgcatgctgtcgcctaaatatgcaggcagaattgtctctcctatttggtattgatagtcctctacagtcacttctggaggggctaggccagatttctacgaacttcacagggcagcaatcagccattttacctctttcaattactcttgtatcttcagacctgaaactgatttagagaccatggggcccacaaacccaattagagtaacaggtgtgcattgagtatacacatagacatgagaatctccactttccacttcctcctgttactgaaatgctcacaaatgtgcaggtaacacctgctgatactcttatccatccagaacctaaatctgcagctccaaattctgaatctaggtcttgaaattttggaaattaaaaaacttatatctgggaaatgcaggtccttttagttgtcaaacttgaagagacattaaaatgagagcacaattatgtctttctccccactttcaactatatgtattcataccttgaaactgtttgctattgccaccagtagctgtgaattaaattaataatgccacactggacactctaagccttaatgatgtacatccagtcaataattaatgttattcctgtaagtaagagtttctgacaaacaagtttgtaccagcccaaagagagaacagcctctgtcctctttttacctttacaaatacacttgtaactggtggtaagcaaaatataaattccaagcaacttgagtctttgctttcatgttataatcctcaagcttggtcctcccaaaactgtctatttatatttatgttgcctc

SEQ ID NO: 2467 - DNA, 309 bp, Homo sapiens
  source 1..309: mol_type = other DNA
ggccaggcacattggcttacacctgtaatcccaacaatttgggagtctgaggtgggtggatcacctgaggtcaaaagttcaagaccagcctagccaacctggtgaaacccaatctctactaaaaacacaaaatttagctgggtggtggcgggcacctgtaatcccagctactcgggaggctgaggcaggagaatcacttgaacctgggagccggaggttgcagtgagtcaagatcgtgccactgcattcgccactgcactccagtctgtgtgacagagcaagactccgtctcaaaaaaaaaaaaaaaaa

SEQ ID NO: 2468 - DNA, 2737 bp, Homo sapiens
  source 1..2737: mol_type = other DNA
gggaagaagtccctcctctgggaggcagaccaggaaaaggcatttaaacaaatcaaagaagccttaactagggctccagccttaggactgccaggtctaactaagcctttctttctataggcccatgagtgaaagggaatggctataggagtcctaactcaggtcacgggatcatggcatcgcctggtggcatacttatccaggcagttggactccatggcgctgggatggcccccatgcttcaaagcattagctgccacagccctactggcatgggaagctgacaaactaactctaggacagcaactaaccacctgagtatcgcactgagttataacattagtcgatcagagagggcaccattggttatcaaatccaataatgagttggtatcaagggcttctatgtaaaaatcctcacgtaactctagagactgtgaacactctaaacccagctattttgctcccaattcaatcagaaccaggaggccctcttcattgctgtatagacacagttgatgaggtattctcaagctggagagatcttacagaccaacccctcagggacccagatatcgagtactttacagatagaagcagttttgtactggaaggagtccaatgggccgggtatgcagtagtaacattgcacttggtggtggaagctcagtctctgcccacagaaacttcagcccaaaaagcagagctgatagctctaacaagagcccttttgctagcaaaggacaaaaagatcaatatttatactgattccaaatatgcttttgccacattgctatatataaggaggagttttaactgccaggggcaaagaaataaatacaaagaagaaattatacagctcttagatgctgtatgagccccagagaaggtagctgttatgcactataaaggacaccagaagtcagggacacaggaggccaagggaaatggaaaagcagacagagaagcaagacagacagcattgactgctccacactctagaaaagaagccctgaccatgcctctcctcccgcaatctcccctccaggagacccggagttactctctaagtgacagggcctggtttgcccaagaatctggagaacatattgaaggaggatggtggaaattatctaatgtgagactagccatccctgaaatggtggcctccaaatttgtgaggcaattccaccaaggaactcacatgggaaaaacggcactagagacgctattaggacaccacttctatgtgccacggctcactgccatcacatgagccatttgtgaacaatgcctaacttgtgcccagaacaacctaatacaggggcccaccaggaccctgggaatgcaggaaataggggccacaccttgtgaaaatctgcttatgggttgccccaagcagggggatattgaaacatgttagtacttgtctgcaccttttcaggatgggtcaaggctttccccatcaggactgagaaagcacgagaagtaactaaagtactgttaagagacattatccctggatttcgactgcccctgactctagcgtcagacaatggaccagcattcatagccaagatagttcaagaactaacacagttattgaaaataaagtggaagttacacatagcctactggccacagagctcagaaaaagtggaacacatgaaccagacactcaaacagctactaaaaaaattttgccaagaaactcatctaaggtgggatcaggtcctgcccatggtcctcctccaagtgaggtacacccccaccaaacaaactgggtattcacctatgagatcttgttcggccaatttaaaggtgatctctgtgaactagaggaattagccttaaggagagagatgcaggctttaagaatagccatgcaaaaaattcatggctgggtatgggaaagaatgcccataagcctcacagacccaatttatccctttagacccggggactctgtttagtttaaaaaatggaatccaacaacactgggacccatatgggatgggccccatattgtaatcttgtctactcactgctgctaaagttgcaggaatcgtgccttggattcaccacagttggctgaaactggtagcccaggacaagtggaccagccagaaggacccaggccatccaacccagctgatcctatgatgggaccgaggtgccaatgaagactacaacagccctgctctggtcacttcagaagctgaccagtctacacacggtggaagcttgaggaaacaacagccctgttctagtcaccccagaagctgactcgtctatgtacggccaaagctcgaggcatcatcaggaaagtaaaagtggttagaaatcttacgtctggaaactttccttgtaatattaattgttttactattgtcctgttgctttgctcaacctcctcctctaggaaaggacctcttctctccatgctaggtataaacatgttattcattacttttgctattccctttaaccacgttaaagggagaatccttagaaggatgcccccactgcactgacaatacgtagacaggaagcaccatgactagaaccctgttctaccacttattataggtatgcagggacccattgaggaacttgtacgcacaaccagataacctactcaatctgcaacccaggaagtggccagccttatatatgttatgacccaaagtccttacctagaacctagttggaggttcatgtcaggtcaaaagaaataa

SEQ ID NO: 2469 - DNA, 29 bp, Homo sapiens
  source 1..29: mol_type = other DNA
ctccttcatttgcaggacatcaagggctc

SEQ ID NO: 2470 - DNA, 418 bp, Homo sapiens
  source 1..418: mol_type = other DNA
aagaaattattcttcaaaagtttagcttgcttaagtttctttgcccttttttcccttgctttcaaggccagacttccttactctctgtgttcccccttccctggtaaacaaccttctcgccagttcttatgtatggagccacatcccacacctgctacccactctgtgaattacccctcccgtcacaagggctacttccaccgaaactgatcttcctgccttgccacaggtataaccgcattcctgcacttttcaagttagccaaccgggtttagccaactggattgtgccatccaactccagccaatggagacaggacacagtaagaaggacaagctgcttagaggtaataaaacccctctactttcctttgttcctgcttactctcatggcaacctacaaggggcaccctcctgca

SEQ ID NO: 2471 - DNA, 788 bp, Homo sapiens
  source 1..788: mol_type = other DNA
cagagttcctttgtgatggttaaacagggtgccacagaaacatatgttgaatttatcaaccgattgcaggctgcaattgaaagacaggtacctcatcctgaagtcgctaaacttcttatgttgcaattggcttttgaaaatgcaataaggattgtcaggcagcaataaccctagtctgagccactgccactgaaatcggtgtgtttattaaaacgtgccagaatgtaggcacttacaacttatctggctcagacttttgctgcagtgatgactggggccacatgttataattgtggccaaactgggcatatggccaaagaatgccaacagaagggagtcccaaagaaatcaaaggcccctaaaataccctctcaagaatgcctgcgattcagcaaaggtaagcactgggctaatcagtgaaattcaaaatttgataaggatgaaacccattattgggaaacgggaagaggggcaagacctccaatgcccagaaaaatccatggaggaacaccaattcccagacttggggaatgactttcccctctgagtcaggaccagaaatagcatccataacctctcttcagccacctctggcagcgcagggctggacctcacagtcatatcagatatggtgcttaaagagcaagatggggtccagctgatttctactggaatctatggcccattacccagaggaacgtttggattgattatcagaagtacacttcaaggaattcaaattttctctggagtcatagattcagactatttagcagaaattaaagtta

SEQ ID NO: 2472 - DNA, 1705 bp, Homo sapiens
  source 1..1705: mol_type = other DNA
ttccacggtctccttctgatgctgagccgaagctggacagtactgctgccatctcggctcactgcaacctccctgcctcgttctcctgcctcagactgccgagtgcctgcgattgcaggtgcgcaccgccacgcctgactgatgttcatatttttttggtggagatggggtttcgctgtgttggccgggctggcctccagctcctaaccgcgagtgatctgccagcctcggcctcccgaggtgtcgggattgcagacggagtctcgttcactcagtgctcaatgttgcccaggctggagtgcagtgacgtgatctcagctagctacaacctccacctcccagctgcctgccttggcctcccaaagtgccaagattgcagcctctgcccggccgccaccccatctgggaagtgaggagcgtctctgcctggccgcccatcatctgggatgtgaggagcccctctgcctggctgcccagtctgggaagtgaggagcccctcttccctgccgccatcccatctaggaagtgaggagcgtctcttcccggctgcccatcgtctgagatgtggggagcgtctctgccccgccgccccgtctgggatgtgaggagcgcctctgcccagccgcgaccccttctggaaggtgaggagcttctctgcccggccgccccgtctgagaagtgaggaggccctcagcccggcagccgccccgtctgagaagtgaggagcccctccgcctggcagccaccccatctgggaagtgaggagcgtctccgcccggcagccatcccatccgggagggaggtggggggcagcccccgcctagccagcctccccgtccgggagggaggtggggggcagcccccgcccagccagcctccccgtccgggagggaggtggggggcagcccccgcccggccagccgccccgtccaggagggaggtggggggcagcccccgcccggccagccgccccatccgggagggaggtggggggcagcccccgcccggccagccgccccgtccgggagggaggtgggggccagcccccgcccggccagcaaccccatccgggagggaggtggggggctcctccgcccggccgccgccccatccgggaggtggggggcgcctctgcctggccgccccttctgggaagtgagcccctttgcctggccgccacaccatctgggaggtgtacccaacagctcattgagaaggggccgtgatgacgatggtggttttgtggaatagaaaaggggtaaatgtggggaaaagatagagaaatcagattgttgctgtgtctgtgtagaaagaagtagacgtaggagactccattttgttctgcactaaggaagattcttctgccttgggatgctgttgatctatgaccttgcccccaaccctgtgctctctgaaacatgtgctgtgtccactcagggttaaatggattaagggcggtgcaagatgtgctttgttaaacagatgcttgaaggcagcatgctcattaagagtcatcaccactccctaatctcaagtacccagggacacaaacactgtggaaggccgcagggttctctgcctaggaaaaccagagacctttgttcacttgtttatctgctgaccttccctcctctattgtcctacgaccctgccaaatccccctctgcgagaaacagccaagaatgatcaattaaaaaaaaaaaaa

SEQ ID NO: 2473 - DNA, 1735 bp, Homo sapiens
  source 1..1735: mol_type = other DNA
tatgagattcagaacatccagtggattgtattcatgtgaaaagaggacaatctttactgtcggctgggtgtgcctgagtgtcaaaacctcaactgtacaatgagcctagttagaacattccctgtaccaaccgaggaatttataaggttcccatgagagtcgcaatcttttgtgactgggagacaattgtaatggtatcgacccataatcgtacctgtggctctatgcccagatatgagagttaacacctctataatgactgggtccagatatgagagttgttacctccctataagctaggcttactaatgagtcaccacctcagctgttgcctgatgttcacatatgacagtcacaatttcaactctgcactgcatccacatgtaagatttaagacctctccagtaggctttgtccatggatgagggtgacaatcttaacaattggcaaagtgtgcatacataaatcacaatcccatctgttttctagagccgttatgacactctgtataccacttgaggactttatacaatatgtgagagagtgtaattttctctgaccttcctaaaaagagaagagtgacaatcttacccatgtacctaagcccacatatgagagatagtatgtctcctattgactggtttcagatatgacagccaacattgtgcctatgatctgaaaaaagatgtcacaatctccactgtggatagggagtgagcaggagacttatatcatctgggtaataggccagggatatgtcacaaacttctctgagagaaggcaccaggcagaagaattaaaacctgggtgctcagtcagggatatgttaaatttcctcctgaaaccagggcacagacagtacagtcacatcacctgggagctgagacgagtgatatgtcacaatgctccctatgagcaaagctcaggcaggagaaacacatcacctgatttctgggtcagaagatacgtcacaatctctcattgtggggaaaccttggtagaaaaggagagtcacatcaaatagttgatgctcttaaagatatgtcacaatgctctgttgtcatggtccatacaggagactcatgtcaccatgttgctgggcccagcaatatgtcacaatgccttttgaggtccaggccaaagcaaacagtaatgtcacattggcatagagctccacaatatgtctccatctcccttgccagcagaacttatgatggaagaagaaccacacttgttggtactgagccaagggatatgtcaaaattccctctgtgagcagggaccaggcaggagaagagagtcataacacctgggtaatgaatggaaatatatgtcataatgctcctttttggcagtagagttacattaccagggtgtcaaacccagcaatatgtcacaattgcttatgtggtcggggaacaggcaggagagtcacataacctgggcatagggctcagagacatgtcccaacgccttccgtaggcagtgccaaggcaggggaggagactcaaatcatttaagtgtaaggtccagcgatatgtcacaatgtcccctgtgagcagcaccaatgcagaaaaatagaatcacatcccctcagttctgggttcagctatgtgtcactattccatctgtgggctggtcttaggcaagagagtcagatcactcaggtgctgggcagagaaaaatgttacaattaaacctgtgggaaggtgcagagatgaaattaacaatccca

SEQ ID NO: 2474 - DNA, 1432 bp, Homo sapiens
  source 1..1432: mol_type = other DNA
tcacaatagcctaagtagacagggcacaggtggcagagttccatcacctgggtgctgagcccaaggatatgtcacaatattcctgtgggcaaggctcaggcaggagagaaacattttctaattgctggatccagtgatgtcacaatcttctctgtgggaagaatgcaggtagaagagaagagtcacatctttctaggtaatgaggccagagacatgccacaaagcctcctgtgggcagggccaaggcaggaacctctcatcccctaggtgtcagtcccagagatacgtccaatattcataatatgccatgccctggcaataaaggcaagttacatcacctaagtgctagggccagggatatgtcacaattcctctttcatcaagacccaggcataagtggagagtcacaccacttgggtgatgaaagaaaagaaacatcatcatacccctgtaggcaaagcccatgcaggagagttacatcacctaggttgtggccccagtgccaaaatacataatgtatgcagggtttaggcaggagaaaagagtaacatcacctaggatcctggctaagcaatatatcaaactctctttttgggaatattccaagcagtagaggagagtcacatcacctaagttctcagtctagcaatatgtcacaatgccccctgtgaaaatgactgaagaataagagcagagtaacataacttaggggctaggccaagctgtgtgtcacaatcacacctgtaagcagggcctagtcatgagaggagagtcgcatcaagtaagttctgggccacacaatatatcacaatccccatatggacaggtctcaggaagacatcacctaggtgctgggcccaggaacatgtgacaatgtctcttacaggcaaacacagggtaggaaatgggaggagataatattaaacatctgatgggccaagagatatgtcataatgccctctgtgggcaggatccaggctggagacacacatcaccttggcgctggggccatgaatattttatagtgccttctgagggcaggcccaaggcaaaagaataacgtcattatgctgttgggcccagcggtatgttacaatctttgctgcaggtggaacctagaaagaagagaggagtcacaccagccaggtactgggcctagcagtatgccacaagatgttttgtgagaaggaactaggcagtaaaaggcagtcacatcacctgggtggtgagcacagagatgtgtgacaatggctcctgcaggcagaacctaaataagggagttacattttctgggttttagacccagtaatatgtcacagtgaaccacgtgggcaaagcagaggagagttaacataatctaggggtgatggcagcaatattttacaatgctcactgtggtcagcaccaaagcaggagagaaaactcccatcac

SEQ ID NO: 2475 - DNA, 145 bp, Homo sapiens
  source 1..145: mol_type = other DNA
atttgattgatgtctcattacaaaatgtataaaagcaagctttgccccgaccaccttgggcacatgttctcagaacctcctgagagctgtgtcacaggccattgtcactcatatatggctcagaatcaatctcttcaattttttt

SEQ ID NO: 2476 - DNA, 496 bp, Homo sapiens
  source 1..496: mol_type = other DNA
ggggcccccaacacccagggcacagacagataccagtctgtggcctgttataaaccaggctgcacaacaggagatgaacagtgagtgagcgaagcttcatcagtattcacagccactccccattgttcatattacagatcagtggcagcattagattatcctaggagtgcagaccctattgtgaactgcacatgtgagggatgtaggttgcacactatttatgagaatctaatgcctaaggatttgttactgtctctcatcaccaccagatgggaacatctagttgcaggagaacaatcccagggctctcactgattctacattatggtgagttgcataattatttcattatacattacaatgtaataatagaaagaaagtgcacaacaaatgtagtgtgcttgaattattccaaaagaaaaccgtcccaccacatatgtgaaaaacctgtcttctgcaaaaccagaccctagtgccaaaaaggttggggacaact

SEQ ID NO: 2477 - DNA, 5978 bp, Homo sapiens
  source 1..5978: mol_type = other DNA
ctgagaaactgtttcatgatgtgtgcattcatctcaaaaagttaaacctttcttttgattcagcagtttggaaacactatttttctaaaatctgtgaagggatatttgggagtgcactgaggcctagggtgaaaaagaaaacatcttcagttaaaacctataaagaagctttctgagaaactgctttgggatatgggcattcatctcacagactttaacctttcctttgattcatatttggaaacactgtttttttttttagattatgcaaagggacatttgggagcaatttgaggcctatggtgaaaaagaaaatatcttcaggtaaaaactagaaagaagctttctgagaaactgttttgtgatgtgtgcattcgtgtcccagagttaaaattttcctttgaatcagcagtttggaaacactgttttgtctgttctgtgaatggacacttgggagctcattgaggccaattgagaaaaagtaactatcccagaataaaaactagaaggaagctatttgagacacccctttataatgtgttcattcatcttgcagagttaaaccattcttttcaatcaccagtttggaaaaactgtttttgtacaatctgcaaagggatatttggtagcacattgacgagtatggtgaaaaaaatcttcagataaaaactagaaagaaggtttctgtgaaactgaattgggatgtgtgcattcatgtaacagaggtaaacctttcttttgattcagcagtttggaaacactgtttttgtccattctgtgaatggacatttgaaagctcattgatgaaaacagcaaaaaagccaatatcccagggtgaaaactagaaggaaactgtctgagaaaccactttgtgatgtgtccattcatctcacagagttaaactgatcttttcattcagcaatttggaaacactgtttttgtagaatctgcaaaaggatatttgggagcaaattgaggccagtgttgaaaaagaaaatatctccagttaaaaactagaaagaagatttatgagtaattgctttgtgatgtgtgctttcatctcacagagttcaatctttctttttattcagcagtttgggaacattgcttttctagaatctgtgaagggatatttggtagcgcattgagccttacggttaaaaacaaattatcttcagataaaaacttgaaagaagcttagtaagaaactgctttgtgatgtgtgcattcatctcacagacttaaacatttctattgactcagcactttggaaacactgtttttgtccattctgcgaatggatatttgggagctcattgaggccaaaggcaaaaaagccaatatcccaggattaaaattagaaggaagctgtcttagaaaccgcttggtgatgtgtgcgttcatctctcagagttcaaccattagttgtattcatctgtttggaaacaccgtttccaggatatttcagagcacattgaggcctatagtgaaaaagaaagtatcttaagataaaaactagaaagaagttttctgagaaactactttgggaagtgttcatttatctaacagagttaaacctttcttttgattcggcagtttggaaaccctgtttttaaccactctgtgaatggacttttgggagctcattgaggtcaatggtgaaaaagcgaatatcccagtaaaaaaactagaaggaagctatctgagaaactgctttgtgatatgtgcaattgcctaggggagttaaatctttcttttcattcaccaatttggaaacaacgtttttacagaatcttcaaagggatatttgggagtgcaaggaggcctatggtgaggaaaaaaatatcttcagataaaagtagaaagaagttttctgaaaaactgctttgtgatgtgtgcattcatctcactgagttaaaccattccttggaatcagcagtttgtaaacacaatttttgtacattgtgtgaaagggcattttgtaactgattgaggtctaaggtgaaaaagcaaatatcccgggataaaaactagaaggaagctgttagagaaaccactttgtgatgtgttcattcatctggcagagttaaatctttcttttctttcagtagtttggaaacactgtttttgtagaatctgtgaatggacatttggcagcattttgaggcctatggtgaaaaggaaaataacttcagataaaaaatagaagaacgctttctgagaaactgcattgtgatgtgtgcattcacctcatagattcaaacctgtgttttgattcagcagtttggagacagtatttgtccattctgccaaaggacatatatgagttcatggaggccaaaggcaaaaaagaaaatgtccaagaataaaaccagacataagctatctgagaaaccgctttgtcatctgcacattcatctcatagaggtaaagcattctcttcattaagtaggttggaaacacagtttttgtagaatctgtgaagggctatttggagcttattgatgccaaatgtgaaaaagccaatatcccaggataaaaacaagaaggaagctatctgagaaactgctttgtaatgtgtacatttaactggcagagtgaaaactttcttttaattgaacagtttggaaacgagtttttgtagaatctgccaagggatatttgggaatgcattgaggcttatggtgaaaaggaaaatatcttcagataaaaactagagagaatctttctgagaaactgctttgtgctgtgtgcattcctctcacagagttaagcctatcttttgattcagcagtttggaaacactgtttttgtagaatctgtgaagggatacttgggagggcattgaggcctatggtgcaataaaaatatgttcagataaaaactagaaggaagctttcagagaaattactctgtgatgggtgcattcctctcacagcattaaacttttccttagattcagcagttctgaaagtctgtttttgtccattcttcgaatggacattttggaaatgactgaggccactgatgaaaaagccaacatcccaggataaaaaactagaaggaagctgtctgagaaactgctttgtgatgtgtgcattcatctcacagaggcaaacatttctgttgattcagtagtatgaaaactgtttttgtccattccatgaatggaaatttgggagctcattgaggttaatggtgaaaaaggaatatcccaagataaaaacttgaaggaagctatctgagaaacactttatgatgtgcacattcatcttgcagagttaaacctttcttttgattgagctgtttggaaatactgtttttatagaatctgcaaagagatatttgggagtgcatggaggcttatggtgaaaaaaatctcttcaaatacatctagaaagaagcttttggagaaattgatttgtgatgtgtccattcacgtcacagaggtaaacctttcttttgattcagctgtttggaaacactgtttttatccattctgtgaatggagagttgggagctccttgaagccaatggtgaaaaactgaatatcccagaataaaaactagaaggaagctatttgagaaatggctttgtgatgggagtattcatctcacagagtgaaaccttacttttcattcagcagtttggaaacactgtttctctagaatctgtgaaggtatatttgggagtgcattgaggtctatggtgaaaaataaattatcttaagataaagccagaaagaagctttctgagaatttactttgtgatgtgtgcctttatctcacagagttaaaccttttattcagaagtttggaaacactgttttgtccattcagcaaatggacattttggagttctttgaggccaatggtgaaaaaacgaatatcccaagatgaaaactagaaggaagctatctgaaaaactgctttgtgatgtgtgcaatcatctcacagagtgaaacgttgcttttcattcagcaggttcaaacaatatttttataaaaactagaaagatgtttctgagaaactgcttgacgtgtgctttcatctcacagagttatacctttcttttcattcagcagtttggaaacactgtttcggtttattctgtgaatggacttttgggagtgcattgaggccaatggagataaagggaatatcccaggataaaaactggaggaaactaactgagaaactgttttgtgagatgtgcatccatctcatagaggtaaacgtttgttttcattcagcattttggaaacactgttattttagaatctgtgaagggatatttggtagtgcattgaggcctagggtgaaaaagaaaatatgttgagataaaaacgggaaagaagctttctgaaaaaattctcagtggagtgtgctatcaactcagaatcaaacatttcttttcattcaacagtttggaaacactgctttttttttacaatctgcgaatggacatttgggagctcattgaagccgacagcgaaaaagcgaatattccaggataaaaactagaaggaagatgtctgagaaacagctttgtgaggtgtgcattaatctctcaagttaaactgttctttacattctgcagtttggaaacactgtttttgtagaatctgcaaagggatatttgggagggcattgaggcttatagtgaaaaagaaaataacttcatatgaaatctagaaagaagctttctgagaaactactttgtgaagtgtgtattcatctcacaaagttaaacctttcttttgattcagcagtttggaaaaatgttttgtagcatatgtgaagcgatatttgggagcacattgagtcttatgatgaaaaagaaaatatcttcatgtaaaaactagaaacaatctttctgagaaacttctttgagatgtgtgcattcatctcacagatttaaaactttcttttgactccacagtttggagtcactgttttctagaaactgtgaagggatattagggaatgaattgaggccaatggtgaaaaagtgaatatcccaggttaaaaactagaaggaaactaactgagaaacctcactgtgatgtgtgcattcatctcacagagtgaaatcttaatttttattcagcagtttggaaacactgtttttgtagaatctgcagtgtaatattttggagcacattgaggcctaaggtgaaaaagaaaatatcttcagataagaactagaaagaagcttttggagaaactgatttgtgatgtgtactttcatctaacagagttcaacttttgttttattcagcagtgtggaaaccctgtttttgtccattctgtgaatggacatgtgggagctcacagaggctgacagtgaaaaagggaatatcccaggataaaaactagagggaagttatctgagaaaccactttgtgatgtgtgcattcatctcacagagttaaactttcttttcattctgcattttggaaacaatgtttctgtagaatctgcgaggtgatatttgggaccatattgaggcctatggtgaaaaagaaaatatctccagataaaaactagaaagaaactttctgagaaatttctttgtgatgtgcgcattcatctcaaagaggtaaacctttcttttgtttcagcagtttggaaacactgtttttgtccattctgtgaattgatatttgggagatcattgaggccaatggcagaaaaacaaatatcgcaggataaaaattagaagaaagctatctgagaaaccgatttttgatgtgtgcattcatctcacagttaaacttttcttttcattgaacaattgggaaacactgtttttttataatctgtgaaattatgtttgtgagtgcattgaagcctaaggctaaaaagcaactataacaggataaaaactagaaggaaactttttgagaaactgctttgtgatgtgtgcattcatctcacagagataaccttacttttgattaagtagtttggaaatac

SEQ ID NO: 2478 - DNA, 6148 bp, Homo sapiens
  source 1..6148: mol_type = other DNA
ggggtggagccaaaaaagccaaataggaacagctccagtctacagctcccagcatgagccacacagaagatggatgatttctgcatttccaactgaggtaccaggttcatctcactggggagtgttggaaagtgggttcaggacagtgggtgcaggacaccgagcatgagccaaaagagggtgaggcatcacctcacctgggaagcacaaggggtcagggaattcactttcctagtcaaagaaagtggtgacagatggcacctggaaaatcaggtcactcccaccataatactgcacttttccaatggtcttagcaaatggcacaccaggagattatatcccttgcatggcttggagggttctacacccatggagccttgcttattgctagcacagcagtataagatcaaactgcaaggtggcagagaggcttggggaggggcacccaccattgccgaggcttgaataggtaaacaaagtggctaggaagctcgaacttggtggagcccaccacagctcaaggaggcctgcctgcctctgtagactccacctccgggggcaggacatagccaaacaaaaggcaacagaaacctttgcagatttaattgtccctgtctgacagctttgaagagagtagtggttctcccagcacgcagctggagatctgagaatggagagattgcctcctcaagtgggtccctgaaccccaagtagcataactgggaagcaccccccagtaggggcagactgacacctcacaaggccgggtactcctctgagacaaaacttccagaggaacaatcaggcatcaacatttgctgttcaccaatatccgctgttctgcagcctttgctgctgatacctaggcaaatagggtctggagtggacctccagcaaactccaacagacctgcagctgagggtcctgactgttagaaggaaaactaacaaacagaaaggacatccacacaaaaaccccatctgtacgtcaccatcattgaagaccaaaggtagaaaaaaccacaaaaatggggaataaaacagaaaagaaaaactggaaactctaaaaattagagtgcctctcctcctccaaaggaatgcagctcctcaccagcaatgaaacaaagctggatggagaatgactttgacgacttgagagaagaaggcttcagatgatcaaactattctgagctaaaagagaaagttcgaacccatggcaaagaagttaaaaaccttgaaaaaaagttagatgaatagctaactagaatagccaatgcagagaagtccttaaaggacttgatggagctgaaaaccaaggcacgagaaatacatgatgaatgcacaagcctcagtaaccaattcgatcaactggaagaaagggtatcagtgatggaagatcaaatgaatgaaatgaagtgagaagagaagcttatagaaaaaagaataaaaagaaatgaacaaagccttcaagaaatatgggactatgtaaaaaccccaaatctacatcggattgttgtatccgaaagtgacagggagaatggaaccaagttggaaaacactctgcgggataatatccaggagaatttccccaatctagcaaggcaggccaacattcaaattcaggaaataacagagaatgctacaaagatactcctcgagaagagcaactccaagacacataattgtcagattcgccaaatttcaaatgaaggaaaaaatgttaaggatagccagagagaaaggtcgggttacccacaaagggaagcccatcggacaaacagcagatatgtcagtagaaactctacaagccggaagagagtgggggccaatattcaacattcttaaagaacagaattttcaacgcagaatttcatatacagtcaaactaagcttcataagtgaaggagaaataaaatgctttacagacaagcaaatgctgagagatttcgtcaccaccaggccttccctaaaagagctcctgaaggaagcactaaacatggaaaggaacaactgataccagccactgcaaaaacaggccaaattgtaaagaccattgaggctaggaagaaactgcatcacctaatgagcaaaatagccagctaacatcataatgacaggatcaaactcacacgtaacaatattaaccttaaatgcaaatgggctaaatgctccaattaaaagacacagactggcaaattggataaaaggtcaggagctatcagtatgctgtattcaggaaacacatctcacatacagagacacacataggcttaaaataaagggatggaggaagatctaccaagaaaatggaaaacataaaaaggcaggaattgcaatcctagtctctgataaaacagaatttaaaccaacaaagatcaaaagagacaaagaaggccattatataatggtaaagggatcaattcaacaagaagagctaactatcctaaatatatatgcacccaatacaggagcacccagattcataaagcaagtccttagagacctacaaagagacttagactcccacacagtaataatgggagactttaacaccccactgtcaacattagacagatcaacgagacagaaagttagcaaggatatccaggaactgaactcagctctgcaccaagtggacctaatagatatctacagaactctccaccccaaatcaacagaatataaattcttttcagcaccacaccacacttattccaaaattgaccacatagttggaagtaaagcactcttccgcaaatgtaaaaggacagaaattataacaaaatgtctctcagaccacagtgcaatcaaactagaacgcaggattaagaaactcactgaaaaccgctcaatgacatggaaactgaacaacctgctcctgagtgactactgggtacataacgaaatggaggcagaaataaagatgttctttgaaaccaaggagaacaaagacacaacataccagaatctctgggacgcattcaaagcagtgtgtagagggaaatttatagcactaaacgcccacaagagaaagtaggaaagatctaaaattgacaccctaacatcacaattaaaagaactagagaagcaagagcaaacacattcaaaatctagcagaaggcaagaacaactaagatcagagtagagctgaaggaaatagacacgcaaaaaacccttcaaaaaatcaatgaatccaggagctggtttttttaaaagatcaacaaaattgatagaccactagcaagactaataaagaagaaaagagagaggaatcaaatagactcaataaaaaatgataaaggggatatcaccaccgatcccatagaaatacaaactaccatcagagaatactataaacacctctacacaaataaactagacaatatagaagaaatggataaattcctcgacacatacacctcccaagactaaaccaggaagaagttgaatctttgaatagactaataacaggctctgaaattgaggcaataattaatagcttgccaagcaaaaaaagtcaaggaccacatggattcatagctgaattctaccagaggaaaaaggaggagctggtaccattccttctgaaactactccaatcaatagaaaaagagggagtcctccctaactcattttatgaggccagcatcatcctgttaccaaagcctggcagagacacaacaaaaaaaaagagaattttagaacaatatccctgatgaacattgatataaaaatcctcaataaatactggcaaaccgaatccagcagcacatcaaaaagcttatccaccatgatcaagtgggcttcatcccagggatgcaacgctggttcaacataggcaaatcaataaacgtaatccagcatataaacagaaccaatgacaaaaccatatgattatctcaatagatgcagaaaaagccttcgacaaaattcaacagcccttcatgctaaaaactctcaataaagtaggtattgatgggatgtacctcaaaataataagagctatctatgacaaacccacagccaatatcatattgaatgtgcgaaaactggaagcattccctttgaaaactggcacaagacagggatgtcctctctcaccactcctattcaacatagtgttggaagttctggccagggcaatcaggcaggagaaagaaagtgtattcaattaggaaaagaggaagtcaaattttccctgtttgccaatgagatgattgtatatctagaaaaccccattgtctcaacccaaaatctccttaagctgataggcaacttcagaaaagtctcaggatacaaaataaatgtgcaaaaatcagaagcattcttatacaccagtaacagacaaacggagagccaaatcatgagtgaactcccattcacaattgcttcaaagagaataaaatacctaggaatccaacttacaagggatatgaaggacttcttcaatgagaactacaaaccaatgctcaatgaaataaaagaggacacaaacaaatggaagaatattccatgctcatggataggaaaaatcaatatcgtgaaaatggccatactgcccaaggtaatttatagattcaatgccatccccatcaagctaccaatgactttcttcaaagaattggaaaaaactactttaaagttcatatggaaccaaaaaagagcccacatcgccaagtcaatcctaagccaaaagaacaaagctggaggcatcacgctacccgacttcaaactatactacaaggctacagtaaccaaaacagcatagtactggtatcaaaacagagatttagaccaatagaacagaacagagccctcagaaataatgctgcacatctacaaccatctgatctttgacaaacctgacaaaaacaagaaatggggaaaggattccctatttaataaatggtgcttgaaaaactggctagccatatgtagaaagctgaaatgagatcccttccttacactttatacaaaaattaactcaagatggattaaagacttacatgttagacctaaaaccataaaaacccaggaagaaaacctaagcaataccattcaggacataggcataggcgaggacttcatgtctaaaacaccaaaagcaatggaaacaaaagccaaaattgacaaataagatctaattaaactaaagagcttctgcacagcacaagaaactaccatcagagtgaacagacaaactacaaaatgggagaaaatttttacaatctactcatctgacaaagggctaatatccagaatcttcaatgaactcaaacaaatttacaagaaaaaaacaaacaaccccatcaacaagtgggcaaaggatatgaacagacgcttctcaaaagaagacatttatgcagccaaaacacacatgaaaaaacactcatcatcacttgccatcagagaaatgcaaatcaaaaccacaatgagataccatctcacaccagttagaatggcaatcattaaaaattcaggaaaccataggtgctggagaggatgtggagaaagacaaacacttttacactgttggtgggactgtaaaccagtccaacccttgtggaagtcagtgtggtgattcctcagggatgtagagctagaaataccatttgacccagccatcccattactgggtatatacctgaaggattataaatcatgctgctataaagacacttgcataggtatgtttattgcagcactattcacaatagcaaagacttgcaaccaagccaaatgtccaacaatgatagaccggattaagaaaacgtggcacatatacaccatggaatactatacagccataaaaaatgatgagttcatgtcctttgtagggacatggatgaagctggaagccatcattctcagcaaactatcgcaaggacaaaaaaccaaacactgtatgttctcactcataggtgggaattgaacaatgagaacagatggacacaggagggggagcatcacacaccggggcctgttgtggggtagggggaggggggagggatagcattaggagatatacctaatgttaaatgacgagttaatgggtgcagcacaccaacatggcacatgtatacatatgtaactaacctgcacattgtgcacatgtaccctaaaacttaaagtataataaaaaatagaaa

SEQ ID NO: 2479 - DNA, 461 bp, Homo sapiens
  source 1..461: mol_type = other DNA
gtaggggttcagtcaagatgctggggaaaactataaaacacaaacattcttggaaggccagggggttttgtatagcttcaaatactttgtctgaaggtggcctaatcctctttgaactatagcaagggtaattaatataggaacatagagtagttaacctaaatagcttgtttacttatgtggtcctaaaactaacctctgatcatccactggtgcatgattgctctctactcgggggttcagcaacaataattaccttctagtggtgtttacctgagacttctgtcattaaatgtgtgctaaataaatgccgggagggccaacaagtcagagccgtggctgacaggactcttcttggagtctgtaagtggcctggatgctcagcaggactgacaagcataagatctgtgtcagtgtacattattcatccgtcgttgagtcagggtctgcaggacaaaccc

SEQ ID NO: 2480 - DNA, 324 bp, Homo sapiens
  source 1..324: mol_type = other DNA
cagttgtttatgacagctgaaaactggacactccctaaatgtccacctttcagtgaagagatagttaagccaattccatttatagaccacctccagccagtgacgctccgagttgaggatgttgaacaacatgggaaggtcgcagcgtactaagtgaagaagtcagaggacagaggaatttctctttctaggagattttcattttgtgtgactcccatggggaggaacagactggcaggaagcacaccggggttaacactggttgacttgaataggattattcgatttttaaaaatacttttccatgttttctgagtgctctat

SEQ ID NO: 2481 - DNA, 343 bp, Homo sapiens
  source 1..343: mol_type = other DNA
cagtcagctctccgtaactgtggtctccacatttagatccaaccagccttggataggaaatatttgaaaaaagaaattgcattggtactgaacacgtacagacctttttttcttgccattattccctaaacaatatggtgtagcatatttacatagcatttatattgtatttggtattataagaaatctagagatgatttaaattatacaggaaggtgtgcgtaggttacgtgcaaacgctatgccattgcccatcagggacttgagcatcctcagatgtcggtgtctgagggttgaggttgcagtcctggaacccatcccccatggatactgaggcatagct

SEQ ID NO: 2482 - DNA, 145 bp, Homo sapiens
  source 1..145: mol_type = other DNA
aggcatacctcattctactatgctttgtgaatactgtgttttttttttaaattgaaggtttgtagcagcctggcatcaggcaagtctatttggcaccattttccaacagcatgtgctcactttgcgtttctgtgtcagcattttg

SEQ ID NO: 2483 - DNA, 209 bp, Homo sapiens
  source 1..209: mol_type = other DNA
tcagcattttgaacagtaaatatttttaaattaaggtttgtacatttgttagacataatgctattgcacatttagtggactgcaatatgcagtaaacatgacttagatgcactgggaaactaaaacaatgcgcttccttgctttattgtgatgttggctttaccgaggtggtctggaactgaacccacaatatctccgagatatacctg

SEQ ID NO: 2484 - DNA, 438 bp, Homo sapiens
  source 1..438: mol_type = other DNA
cccaaactcctccatgcaagttctgcttcctcttataagtacacaactcagttaagtattcacatacacacagaaaatacgggtgtgaaaagaaagaattttctgtaaaaattaagttgaatactttggtaaaaagtgataaaggctgagttgccaataaaagttgcttttaaattaggtgtggctgggaatattataagatattggggaaaatatacaaatcaagaaaatttctgagcttagattgcttcatagatttatttaagtactcatcccacctttaaaacctctaaactgagaagaagggacccaaatcatgttattggtgtgatttatgtgagaagtagaactgtagtcattggacccttaggcaaaggaaaatccgtgtctttatatcagaagatcggcaaacgaatgtatattacacagtttaggtta

SEQ ID NO: 2485 - DNA, 311 bp, Homo sapiens
  source 1..311: mol_type = other DNA
gctgggcacagtggctcacgcctgtaatcccacactttgggaggccaaggcgggcagatcatgaggtcaggagatcgagaccagcctggccaacatggtgaaactctgtttctactaaaaatacaaaatttagtggggcatggtggtgcatgcctatagtcccagctactcaggaggctgaggcatgagaatcgctggaacctgggaggtggaggttgcagtgagccgagattgggccactgcactccagcctgggttctgggcaagagtgagacactctgtctcaaaaaaaaaaaaaaaaaaaaaaaaaa

SEQ ID NO: 2486 - DNA, 293 bp, Homo sapiens
  source 1..293: mol_type = other DNA
gacggttgtggtggctcatgcctgtaatcccagcactttgggaggctgaggtgggtggatcatttgaggtcaggatttcgaaacccgcctggccaacatggtgaaacctcacctcaactaaaaatacaaaaatcagccaggcatgctggagggcaccttgtagtcccagctatttgggaggctgaggtaggagaatcgcttgatcccagggggcggaggttgcactgagctgagatcacaccactgcactccagcctgggcaacacagcaagacgctatctcaaacaaaaaaa

SEQ ID NO: 2487 - DNA, 195 bp, Homo sapiens
  source 1..195: mol_type = other DNA
gacccgtctctctacaaaaaatgaaaaaactagcagggcatagtggtacaacctgtagtctcaactacttgggaggctgaggcaagaggattactggctgcagtgagctgtgatcatgccactgcactccagtctgggcaatggaacaagaccctgtctcaaaaaaaaaaaaaagttgtcaaaaaaaaaaaaaaa

SEQ ID NO: 2488 - DNA, 295 bp, Homo sapiens
  source 1..295: mol_type = other DNA
gctgggcgcggtggctcacgcctgtaatcccagcactttgggaggctgaggcgggcggatcacgaggtcaggagatcgagaccatcctgactaacacagtgagacactgtctctgctaaaaaaatatataaaaaattagccgggcatggtggcaggtgcctgtactcccagctacacaggagtctgaggcaggagaatggcgtgaacctgggaggcggagcttgcaatgagctgagaccgtgctactgcactccagcttgggcgacagagcgagactccgtctcaaaaaaaaaaa

SEQ ID NO: 2489 - DNA, 118 bp, Homo sapiens
  source 1..118: mol_type = other DNA
ggctgggtgtggcggctcacgcctgtaatcccagcactgtgggaggctgaggtgggagatctcttgagccctggaattcaagaccagtctagtctgggaaacacagcaagacccgcct

SEQ ID NO: 2490 - DNA, 160 bp, Homo sapiens
  source 1..160: mol_type = other DNA
aaatgagctgggtgtactggcatgcatctgcggacccagctacttggaaggctgaggtgagaagatcaccttagcctgggaatttgaggcttcagtcagctatgattgtatcactgcagtccagcctgggcaacaaagaccctgtctctaagaaaaaaaa

SEQ ID NO: 2491 - DNA, 289 bp, Homo sapiens
  source 1..289: mol_type = other DNA
gccgggcgcggtgactcacgcctgtaatcccagcactttgggaggccaaagcaggcggatcatgaggtcaggagatcaagaccatcctggctaacacggtgaaaccccgtctctactaaaaatacaaaaaattagccgggtgtggtggcgggcacctgtagtcccagctactcgggaggctgaggcaggagaatggcgtgaagccgggaggtggagcttgcagtgagccgagatcacaccactgcactccagcctgggcaacaaagcaagactctcaaaaaagaaaaaa

SEQ ID NO: 2492 - DNA, 301 bp, Homo sapiens
  source 1..301: mol_type = other DNA
gaggccagagaatagggtctggagacaaaggagcattcacttcagcctctgactggtggcaggccaagtctttatttacatagggtgtaaccaaataggaaacctctaaagggtacttaaaccccagattttctacacagggcacttgcttgagcctcatcccgctttctggaatgtacttttgcttcaataaatctgtgcttttgttccttcttttgttgctttgtgtgttttgtccacctctttgttcaatattccaagaacctggacgacttgtagtcaagatcctcccctggtaata

SEQ ID NO: 2493 - DNA, 639 bp, Homo sapiens
  source 1..639: mol_type = other DNA
gagaggtgaagccagctgggcttctggatcaggtggggccttggagaacttttctgtatagctgaaggattgtaaatacaccaatcagtgctctgtgtctagctaaaggtttgtaaatgcaccagtcagcactctgtaaaaacggaccaaacagcactctgtaaaatagaccaatcagcgctctgtaaaatggacaaatcagcaggatgtgggcggggccaaataagggaataaaaacgggccacccgaacaaccagcggcaaccgcgctggggtctacttcccaggtgtgggatgtttgttcttttgctctttgggtctgcactacctttatgagctgcaacactcaccctgaaggtctgcagcttcactcttgaagccagcgagaccacaaacccactgggaggaacgaacaactccagacacgccgtctttaggagctgtaacactcactgtgaaggtctgcagcttcactcctgaagccagcgaaatcatgaacccaccgggaggaacaaacaactccagcacgactccagacgcaccgcctttatgagctgtaacacacaccgcgagggtctgcagcttcactcctgaagccagccagaccaggaacccaccagaaggaaccaattccggacac

SEQ ID NO: 2494 - DNA, 77 bp, Homo sapiens
  source 1..77: mol_type = other DNA
gcggtggcttacgcctttaatcccagcacttcggaaggcggaggcgggcggatcgcttgaggtcgagttctaaacca

SEQ ID NO: 2495 - DNA, 220 bp, Homo sapiens
  source 1..220: mol_type = other DNA
ccagcctaacgaacatggcgaaacgccgtctctactaaaaatacaaaaaaaaattagctgggcgtggtggcacgtgtctataatcccagctattcgagaggttgaggtaggagaatcgcttcaacccgggaggcagaggttgcagtgagtcgaggtcgctccattgcactccagcctggagacagaacgagactccgtctcaaaaaaaaaaaaaaaaaaa

SEQ ID NO: 2496 - DNA, 305 bp, Homo sapiens
  source 1..305: mol_type = other DNA
ggcttggcattgtggctcacgcctgtaatcccagcactttgggaggctgagacgggaggctcacttgaggccaggagttcaagaccagcctgggcaacatagcaagaccccgtcactagcaaaaaagaaaagaaaaaaaattagccggacatagtggagggcacctgtggtctcagctaatggggaagctgaggcgggatgatcgcttgagctcaataggtcgagtttatggtgagctatgagtgccactatatagtgagtgccactgcactccagtctgggaagcagaatgagaccctgtctca

SEQ ID NO: 2497 - DNA, 565 bp, Homo sapiens
  source 1..565: mol_type = other DNA
tgtggtcagctgaagaacagcccctcaaagatgtccacagtctaatcgctgtatcctgtgatacgttacatggcaaaatggactttgcagatgtgattaaggttctagaccttgggaagggagagattaacctggattatctggctgggctcagtgtaatcacgtgggctcttaaaagtgggagacagaggccagagagtccatcagaaagaggcaggggatttcgaagcataatggggacttgacctgctgttagtggccttgaaaatgatggaaggggccatgagccaaggaatgtgggtggcctctagaagtagacaccaaccctcaggttacagccagcagagagacagggccctcagtcctatagccatcagaaactgaattcagccaacaatttaaataattaaggaaacagttctcccctagagcctccagaaagaaatgcactcctgcagacacgttgatttttaggccagcgagaactgtgttggaattgtaagaaaaaatttgacatagcaagaccccatctgtacaaaacattttcaaaaaattagctggagtt

SEQ ID NO: 2498 - DNA, 669 bp, Homo sapiens
  source 1..669: mol_type = other DNA
cttgggcaccgttagctccccttgccctctgtaccctctactttcctcccttgccctctccccctgcgctttccaccctggatatatatataatactctccctctaccacctcctccctggccctggttctgtccaccattgtcgcccatctggcctctgcagcagccttctctagggtcttgctggcctgcctgcactcccacctctgatagccacaaggacccatcaacatttgagtcagatctggtttctcctctgctcagagccctcctcccgcccattgccctcaaggtagaaaccacattcctcactagggccctcaaagtcccatatgatccagttcctttccttcttggacctcaccccacctcactctccccatcaatcctactccagccacagtggcctccccactgttcctggggcatatccagcatgatcctatcccaaggcctttgcactggctgttcctgcagcctgaaagctcttcccccaaatatccacgtggctccttccctcaccagtgtctgggctttatttgattgtgagcaaaacctctggctgtcctattcagaatttccatcctctcctccacactttccaatctcattcccttctttattttacttcataggaattattcttgcctaatattcttgcctcataat

SEQ ID NO: 2499 - DNA, 133 bp, Homo sapiens
  source 1..133: mol_type = other DNA
ggacaggcacggtggctcatgcctctaatcccagcactttgggaggctgaggcgggaggatcacttgagcccagaagtttaagactagcccagggaacatatcgattctctgtctctataaaaaaatagaaaa

SEQ ID NO: 2500 - DNA, 622 bp, Homo sapiens
  source 1..622: mol_type = other DNA
cctaagcccccccagtgactgaacagactccctcttggccaaggggaccccagaaaaaccttaaaacttgagttcctggccatgataggatgggaggtcagacatgcctcattatacgtctttaccttttacagttcagacactgaccagcattcatgttaaaatagagatcataagactgacagaacggaccctttatggaagtaagataccaaattataaatagaactaaggtcatgccaggcaagtggtaagtcacgcacctctacacttaaagaataacttatgctctaactgccacgaggcttttctttttctctagcagataaacaagcactggcctcaggataagcagtgttgaaacatttggaagctcctgcagatgctgaataactgacctccagcctctgttccaccagccacaactacagctttgattggagaagagactgatttcagccactttctcctggtaagaagaacagggactggtcctggctggtttacagaggttgctcacaggttgccttcctgtcttgaaaataccttttgatatttagggcctaattgtaataacatttaaatgctaagtctccactccaaggtgaacataggttggttt

SEQ ID NO: 2501 - DNA, 62 bp, Homo sapiens
  source 1..62: mol_type = other DNA
tcccttcagtaattttcaagagtataaaccgaccttgagatccacaagtttgagaattgctg

SEQ ID NO: 2502 - DNA, 442 bp, Homo sapiens
  source 1..442: mol_type = other DNA
gcagggtctcctaattttccctcctttttcctctgtcctgaccaagaaacagagtgccttgaccaacctgcgacccagccagctgcgtgttttctctgcagacttgaacccaagccagggcttgaacattcccaggcactgataaaggtgtttagacactgaaagaaaccagccctggccctgggccaaattccttaaaccctcatgcaaacccctcccttgccccctcccttttctctcattgttcgtcttgaggatgctgcagcccactctgcaaattcccctccgaaatgctttgcactaatcaccctggcatttggtgcttcttgctttgggaacccatctggccccctcttgggatggtttggggaactcctcgacagaaactcccttgccacagcttttcggggtgactccagccagatccggctgggatggaaca

SEQ ID NO: 2503 - DNA, 273 bp, Homo sapiens
  source 1..273: mol_type = other DNA
atccatccagtggctcaggccaaaatctcagtagccatccttgactcctccttcttcttcctccatatctaatccattggttctagttggcttcagttttcaaaatacatgttcacttctcactatctgactactgcaggccccatggaagccaccgccgtctctcttccaggccagtttgaaagacttcctactgaacgccctccctccattcctgcctcttgcccccaccccatccactctctacattgcagtcagagtgatctttttcaa

SEQ ID NO: 2504 - DNA, 271 bp, Homo sapiens
  source 1..271: mol_type = other DNA
gccaggcgcggtggctcacgcctgtaatcccaatactttgggaggccaaggcgggcgaatcaactgaagtcaggagttcaagaccagcctgaccaacatggtgaaaccccgtctctactgaaaatacaaaaattagctgggtgtggtggcgcgcacctgtaagggaggctgaggcaggagaattgcttgagcctgggaagcagaggttgcagtgagccgatatcaccccactgcaatccagcctggatgaaaaagcaagactctgtctcaa

SEQ ID NO: 2505 - DNA, 143 bp, Homo sapiens
  source 1..143: mol_type = other DNA
cttgttgagagactaaggaagtagtttgccctctcttaacctctgttggccgctctgtaaactgcgggcacactctggccttctcaggtggtggtgaggcttccctgagctctcgcctgcgaagtggtcagcacgtccccggc

SEQ ID NO: 2506 - DNA, 183 bp, Homo sapiens
  source 1..183: mol_type = other DNA
tgtcagccaaaaataaaattctaaactcccccaactaactgaatgtagcccttctctcggcccagggcattctaaagtaaaactgaaacactggttcaggccatgatgggaacggatgttcggatgttcgcacaagcctcattataccttcctccctttggaattcaggcatagttgaccagc

SEQ ID NO: 2507 - DNA, 143 bp, Homo sapiens
  source 1..143: mol_type = other DNA
acctctgccttgccccaatcactcattctttaggtctcagctcacatgtcctctgctcaggggagcccgcactgcttccacggcaggccaggcggctcctctgggtccccataacccggggttttcccatcataaccccgatc

SEQ ID NO: 2508 - DNA, 344 bp, Homo sapiens
  source 1..344: mol_type = other DNA
tttttatcagaaatctacatcaactgcctgacttaatagtaaaacaatagaactaacccatacaaggatggaaacaagattatgatgctaattcatattttgctgaaaggtttagcccaggaactaaaaaaatacatatataatgaggtattaaaattgttaagaaataattcaaatttagcatagacaatgtaagtgtgtaaaatgatgaattattacaccaagaaagttcagtaagtttgccacacaagatatcaacattggaaactcaatacctttcttctaccccaataataatttagattatgtaatggaaaaaaggattgcttataatacataaaata

SEQ ID NO: 2509 - DNA, 295 bp, Homo sapiens
  source 1..295: mol_type = other DNA
gctgggcatggtggctcacacctgtaatcccagcactttgggaggccgaggcaggcggattacttgaggtcaggagttcgaaaccagcctggccaacatagtgaaaccccgtccctactaaaaaatacaaaaattagtcgagtgtggtggcacgtgcctgtagtcccagctactcaggaagctgaggcaggagaatcacttgaacccaggaaaaggaggttgcagtgagcctggattgcaccactgcactccagcctgggtgacaagagcaaaactctgtttaaaaaaaaaaaaa

SEQ ID NO: 2510 - DNA, 166 bp, Homo sapiens
  source 1..166: mol_type = other DNA
aagtaaccaaatttctgatgaagaggttatttatggaagaatcacaactaataacttcagagaaaatactagaattcaaaaaccactatttgctattaattaatctagtgatggatacaggtaatgatgatcaagggctactaaaactattaggggaaaggttgat

SEQ ID NO: 2511 - DNA, 312 bp, Homo sapiens
  source 1..312: mol_type = other DNA
accgggcgcagtggttcacgcctgtaatccccacactttgggaggccgagatgggtggattacctgaggtccggagttcgagaccaggctggccaacgtggtgaaaccccatctctactaaaaatacaaaaattagccaggcatggtggcaggtgcctataatcccagctacttgggaggctgagaaaggagaattgcttgaacctgggaggcagaggttgcactgagccaagactgcgcctttgcactccagcctgcggaagaagagcaaaactccgtctcaaaaaaaaaaaaaaaaaaaaaaaaaaaaaa

SEQ ID NO: 2512 - DNA, 253 bp, Homo sapiens
  source 1..253: mol_type = other DNA
ctcctctttgggatccaggaatctgattcctcaaccatctctttcacaggacccaagagtccaggccctcaatccccctcctctcttgggatccagaaattgaggccccagcttcctcattcctcaggacccaggccctccccactcaaatccaggagtcggcgttcgcaggtccttcatctcttagacttaagaatccaggccccgaggccctcttccctcgggtgctctagtccagtcccctctcttctcc

SEQ ID NO: 2513 - DNA, 304 bp, Homo sapiens
  source 1..304: mol_type = other DNA
gccgggcgcggtggctcacgcctggtaatcccagcactttgggaggccaaggagggcggatcacaaggtcaggagatcgagaccatcctggccaacacggtgaaaccccgtctctactaaaaatacaaaaaattagccgggcgaggtgacaggtgcctgtagtcccagctacgtgggaggctgaggcaggagaatggcatgaaccctggggcgcggagcctgcagtgagccgagatcgcgccactgcactccagcctgagtgacagcgagactccgtctcaaaaaaaaaaaaaaaaaaaaaaga

SEQ ID NO: 2514 - DNA, 84 bp, Homo sapiens
  source 1..84: mol_type = other DNA
tcatgtcattgttccccatttaacatcagtcctctcaagatgtcgtgaccccatggtcaccctgaagcccttagattccaaccc

SEQ ID NO: 2515 - DNA, 319 bp, Homo sapiens
  source 1..319: mol_type = other DNA
ggctggacgcagtggctcatgccactaatcccagcactttgggaagctgaggtgggcaggatcacttgagctcagaagttcaagaccagcctaggcaacatggcaagaccccatctctgcaaaaaattcaaatccaaaaattagcagggtgtggggtggtacatgcctgtagtcccagctacttgggagcctgaagcaggaggactgcttaagcctgggaggtggacgttgcagtgagccgtgatcatgccactgtgctccagcctgggtgacaaagcaagaccctgtctcaaaaaaaaaaaaaaaaaaaaaaaaaaga

SEQ ID NO: 2516 - DNA, 163 bp, Homo sapiens
  source 1..163: mol_type = other DNA
tagtctgacaactggcaagttcccatttctgttctagccctattctgagctcctgatctgtatatccaactgcctaatcgatctctctgcctgcatgtgttcagaaacctacactctgaatgtatagagtctcaaacttgatctccctcctgcaagttgcttc

SEQ ID NO: 2517 - DNA, 184 bp, Homo sapiens
  source 1..184: mol_type = other DNA
gaaacctgcagcagagataatggtgaaagtttaggcacattttcactaaaagtgggaacagaaaatggaggcctgttttttattgctaccaccatagatctggagatcttcgccagtaacaagaaaaattaagttgtaaatattggaaaggaacagacaaaaatagatgacatggtcatctaca

SEQ ID NO: 2518 - DNA, 190 bp, Homo sapiens
  source 1..190: mol_type = other DNA
agcagaagagatttcaaaaaaagacctatgcatttattagaatttggaatatgatacaagtggcatcaggaaatgaggaaataatggaactattttttttaagtggaggtagtttgttctccaagggggaaaaatagaccatgaactatacacaaaagtgaatccagagattaaaaacagaaatatggaa

SEQ ID NO: 2519 - DNA, 429 bp, Homo sapiens
  source 1..429: mol_type = other DNA
ggaaatacgcactaggatatttactgtggcttgatttgtagtagccaaaaattagaaacaactgagaaagcccatcacgaacaatatgggaaattcttatgtaatactatatatctgtaaaatgcaacaaatgaaatccacatgtattaacagaaagatcccagaattgttgaggggggatcaagttgcagaatgatacagatagtacaatgacttttttgtaaatttgaattaaaagtttcctcataaaactcagtactatctattggtaatggatgcatatatgtatgtacatgtttttgaaacggattggaaggatacagaccaaactcttgatagtggtcacctgtgaagagtggagaagggaaaataatgagtgtgggaggtgggatgggtattggttaaaggggacttcagctttttatataa

SEQ ID NO: 2520 - DNA, 115 bp, Homo sapiens
  source 1..115: mol_type = other DNA
aaagacttcaagtaaatataagaagatactgattgattctggattgtggtatagggatatcttgtcttattttttgtacttttctgtatttttaaaatttctcaaaataggaatg

SEQ ID NO: 2521 - DNA, 556 bp, Homo sapiens
  source 1..556: mol_type = other DNA
tgtagtgtccaacctggtttttactaaccctgtttttagactctccctttcctttaatcactcagccttgtttccacctgaattgactctcccttagctaagagcgccagatggactccatcttggctctttcactggcagccgcttcctcaaggacttaacttgtgcaagctgactcccagcacatccaagaatgcaattaactgataagatactgtggcaagctatatccgcagttcccaggaattcgtccaattgattacacccaaaagccccgcgtctatcaccttgtaataatcttaaagcccctgcacctggaactattaacgttcctgtaaccatttatccttttaacttttttgcctactttatttctgtaaaattgttttaactagaccccccctctcctttctaaaccaaagtataaaagcaaatctagccccttcttcaggccgagagaatttcgagcgttagccgtctcttggccaccagctaaataaacggattcttcatgtgtctcaaagtgtggcgttttctctaactcgctcaggtacga

SEQ ID NO: 2522 - DNA, 135 bp, Homo sapiens
  source 1..135: mol_type = other DNA
tagattaattctttttcttaattttgtaaaacaatgcatagcttctgtcaaacttatgtatcttaagactcaatataacccccttgttataactgaggaatcaatgatttgattccccaaaaacacaagtgggga

SEQ ID NO: 2523 - DNA, 1808 bp, Homo sapiens
  source 1..1808: mol_type = other DNA
gcatcctggagtatcagagtttactgttagatcagcctcatttgacttcccctcccacatggtgtttaaatccagctacactacttcctgactcaaactccactattcctgttcatgactgtcaggaactgttggaaactactgaaactggccgacctgatcttcaaaatgtgcccctaggaaaggtggatgccaccgtgttcacagacagtagcagcttcctcgagaagggactacgaaaggccggtgcagctgttaccatggagacagatgtgttgtgggctcaggctttaccagcaaacacctcagcacaaaaggctgaattgatcgccctcactcaggctctccgatggggtaaggatattaacgttaacactgacagcaggtacgcctttgctactgtgcatgtacgtggagccatctaccaggagcgtgggctactcacctcagcaggtggctgtaatccactgtaaaggacatcaaaaggaaaacacggctgttgcccgtggtaaccagaaagctgattcagcagctcaagatgcagtgtgactttcagtcacgcctctaaacttgctgcccacagtctcctttccacagccagatctgcctgacaatcccgcatactcaacagaagaagaaaactggcctcagaactcagagccaataaaaatcaggaaggttggtggattcttcctgactctagaatcttcataccccgaactcttgggaaaactttaatcagtcacctacagtctaccacccatttaggaggagcaaagctacctcagctcctccggagccgttttaagatcccccatcttcaaagcctaacagatcaagcagctctccggtgcacaacctgcgcccaggtaaatgccaaaaaaggtcctaaacccagcccaggccaccgtctccaagaaaactcaccaggagaaaagtgggaaattgactttacagaagtaaaaccacaccgggctgggtacaaataccttctagtactggtagacaccttctctggatggactgaagcatttgctaccaaaaacgaaactgtcaatatggtagttaagtttttactcaatgaaatcatccctcgacatgggctgcctgttgccatagggtctgataatggaccggccttcgccttgtctatagtttagtcagtcagtaaggcgttaaacattcaatggaagctccattgtgcctatcgaccccagagctctgggcaagtagaacgcatgaactgcaccctaaaaaacactcttacaaaattaatcttagaaaccggtgtaaattgtgtaagtctccttcctttagccctacttagagtaaggtgcaccccttactgggctgggttcttaccttttgaaatcatgtatgggagggcgctgcctatcttgcctaagctaagagatgcccaattggcaaaaatatcacaaactaatttattacagtacctacagtctccccaacaggtacaagatatcatcctgccacttgttcgaggaacccatcccaatccaattcctgaacagacagggccctgccattcattcccgccaggtgacctgttgtttgttaaaaagttccagagagaaggactccctcctgcttggaagagacctcacaccgtcatcacgatgccaacggctctgaaggtggatggcattcctgcgtggattcatcactcccgcatcaaaaaggccaacggagcccaactagaaacatgggtccccagggctgggtcaggccccttaaaactgcacctaagttgggtgaagccattagattaattctttttcttaatt

SEQ ID NO: 2524 - DNA, 124 bp, Homo sapiens
  source 1..124: mol_type = other DNA
gccgggcacggtggctcacgcctgtaatcccagcacttcgggaggccaaggtgggcggatcacctgaggtcgggagttcaagaccagcctttggagaaaccccatctctactaaaaatacaaaa

SEQ ID NO: 2525 - DNA, 108 bp, Homo sapiens
  source 1..108: mol_type = other DNA
cctctctgtgttccttgaatgcacaaaaatatctttgcttgattggcgcatgttgtttcctctgctaggagatccccctcaccttgccctgtcttctctggtgagccc

SEQ ID NO: 2526 - DNA, 303 bp, Homo sapiens
  source 1..303: mol_type = other DNA
ggccgggtgcggtggctcacgcctgtaatcccaacactttgtgaggccgaggtgagtgtatcacctgaggtcaggagttcgagaccagcctgaccaacaggaaggatccctgtctctactaaaaatacaaaattagccaggcgtggtggcacatgcctgtaatcccagctactcgggaggctgaagcaggagaatcacttgaacaggagacagaggttgtgatgaaccgagatcacatcattgcactccagcctgggcaacaagatcgaaactctgtttaaaaaaaaaaaaaaaaaaaaaaaa

SEQ ID NO: 2527 - DNA, 304 bp, Homo sapiens
  source 1..304: mol_type = other DNA
gccgggcacagtggctcaggcctgtaatcccagcactttgagaggctgaggtgggcagatcacgaggtcaggagatccagaccatcctggccaacacggtgaaaccccgtttctactaaaaacacaaaaacaaaattaaccaggtgtggtagcatgagcctgtagtcccaactactccaggggctgaggtgggagaatggtgtgaacccggaaggcagagcttgcagtgagcagagatcgccatactacactccagcctgggcaacagagcgagactctgtctaaaaaaaaaaaaaagagagag

SEQ ID NO: 2528 - DNA, 615 bp, Homo sapiens
  source 1..615: mol_type = other DNA
gatagtggcaggaggcagtcaaatgcccaggcagataggggtgggtacctggtgaaacccaaccttaaagctgaagacagtcccggctaaatcctcatactgaattgagaacctgtcttcccatttggtgtgctttcctccgattgatcccaacccttcacctattttacgtatacctgccctttcctaattggtttttacactgctgtgcccaccttttgagtggtgcctttgcatacttacaaatcagtcaacgtgtattcccctattctgagcccataaaagacccagactcagctgcagtgaggagagaaatcaccctgctgtgggggttggggaccactccctgcatcccctctccactgagagctgttcttttgctcaataaaattcttttctacccatcctcacccttcaattgtcagtgtatcctcattctttttggactcaggacaagcgctcagaaccactaaacatgggtataagctataatacaggcaggccaagagggcagggcacctccagcagcaggcccagggctaagtgagatccaggcagagggctgtcgctggctgtggaggtcctcagttggcaatgtggctgagaaaattcctg

SEQ ID NO: 2529 - DNA, 688 bp, Homo sapiens
  source 1..688: mol_type = other DNA
agcttcctaattggtctctgtgcttcttcccttgacctccctgctctttcctcattcgtcctcccataggccattctcatcagagcagccaaagctgtcttcttaaattgtaagcagatagtatcacttccatgctcaaaaaccctccagcagcttcccatctcactcagaggaaaagccaaaattaatactacgggccataaagcccaatttgatctgccctcctcccatccacttacctttcttctcttctctcccactactctccccttcaattattctattttagcctcttcattaacaggcatgttgccacttcagagcctttacaactgctgttccctctgcctggaataacttttctcactcacgcataaatagctcctttacttccttcatatctttattactaccttttcaggatgccttccctggcgagcccatctaaaactcagactcctatctctagttctaaatatcctctcacttcacattttttcttagtattcttcaccatttaaaatacttcatacttaatttacttaccttgtttattatccagcccacaaaaatgtaagtaccatgatagtagggggtttgtctcttgttcactgctatatcccaagcacctaggattgtgcctgttacacagacagccttcaataaatgagtctatgaatgaatgaat

SEQ ID NO: 2530 - DNA, 301 bp, Homo sapiens
  source 1..301: mol_type = other DNA
ggctgggggcggtggcccatgcctgtaatcccagcactctgggaggccaaagcgggtggatgacctgaggtcaggagttggagaccagcctggccaacatggcaaaaccctgtctctactaaaaatacaaaaattagccggacatgatggccacgcctgtagtcccagctatttggaaggctgaggcaggagaataatagcttgaatctgggagacagaggctgcagtgagctgagatcctgccactgcactccagcctgggcaacagagcaagactccaactcaaaaaaaaaaaaaaaag

SEQ ID NO: 2531 - DNA, 45 bp, Homo sapiens
  source 1..45: mol_type = other DNA
tctagaggcagccactcatggattcaagtcctggctccgcctctt

SEQ ID NO: 2532 - DNA, 78 bp, Homo sapiens
  source 1..78: mol_type = other DNA
atttacatcacaagcgccagggtctgtttattaaaaccccttcccagcagagggcagtacagtgtcttgtcccagcag

SEQ ID NO: 2533 - DNA, 303 bp, Homo sapiens
  source 1..303: mol_type = other DNA
gccaggtgcagtggctcacacctgtggaatcccagcacttcaggaggccgaggtgggaggatcactggagctcgggagttcaagaccagcctgggcaacatagtgaaaccgtctccacaaataatttttaaaaaattagccaggcatggtggtgccgcctgtagtcccagctactcaggaggcttgggtgggaggattgcctgagaccaggaggttgaggctgcagtgagccgtgatttcaccaccactccagcctgggtgagaaagcaagaccctatatcaatgaaaaaaaaaaaaaaaaag

SEQ ID NO: 2534 - DNA, 231 bp, Homo sapiens
  source 1..231: mol_type = other DNA
gatggtcagttttatgtgtcaacttggacgggctacagtcccagttattcaaacactcatctagctgtcgccatggaagtgttttgtagatgtgattaaagtccataatcagttgactttagataagggagattatcctacaaaatcgggggattgggtaaaaaactgattcaattagataaatgggcaaaactgaggctcccctgaaggagaaattcctcctagggacag

SEQ ID NO: 2535 - DNA, 295 bp, Homo sapiens
  source 1..295: mol_type = other DNA
gccgggggcggtggctcacgcctgtaatcccaacactttgggagcccgaggcgggcggatcacaaggtcaggagttcgagaccagcctggccaacacggtgaaaccccgactctactaaaaatacaaaaaattagccgggtgtggtggcacacacctgtagtcccagctactcgggaggctgaggcaggagaatcgtttgaacctgggaggcagaggttgcagtgagccaagatcacactattgcactccagcctgggcgacagggcaagactctgtctcaaaaaaaataaaaaa

SEQ ID NO: 2536 - DNA, 147 bp, Homo sapiens
  source 1..147: mol_type = other DNA
ctctgttggggaaagggttagttgtcttcagttgtatgcaagataactgcatcatgttgggtgggactatgactatgttatcgtacttatttggagattaagtgtggttaaggagatgtgtgagggtgcccagatgacaaggactag

SEQ ID NO: 2537 - DNA, 87 bp, Homo sapiens
  source 1..87: mol_type = other DNA
tcatttttctgttttctcaccatctgatatattttacttttgtcacatttactgtctctcactagaacatcagctccacaaatacag

SEQ ID NO: 2538 - DNA, 150 bp, Homo sapiens
  source 1..150: mol_type = other DNA
gccgggcgcggtggctcacgcctgtaaagtaatcccagcactttgggaggccgaagcgggaggatcgctcgggtccaagcgttcgggaccagcctagggatgcgagactcccttctctatttaaataatactaaaaaagaagaaagaaaa

SEQ ID NO: 2539 - DNA, 305 bp, Homo sapiens
  source 1..305: mol_type = other DNA
gggcaggcacagtggctcatacctgtaatcccagcactttgggaggccaaggcaggcagatcgcttgaggtcaggagttcaagaccagcccggccaacatggtgaaaccccatctctactaaaaatacaaaaatgagctgggcatggtagtgcatgcctgcaatcccagctactcaggaggctgaggcaggagaatcgcttgaacctgggaaggcagaggttgcagtgagccaagatggcaccactgcactccggcttgggcaacagggcgagacaccatctcaaacaaaaataaaaaaataaaa

SEQ ID NO: 2540 - DNA, 37 bp, Homo sapiens
  source 1..37: mol_type = other DNA
gctgaagctcccacactgtcttccagggctgaggaga

SEQ ID NO: 2541 - DNA, 269 bp, Homo sapiens
  source 1..269: mol_type = other DNA
taagctttgtcagtagagggcaccaaacaggcattataggaggaaaggcgcctccttcgtggttcttgttggttgtgcttctgcctctggacgccgcagtgcatgtggcttccccagcacccagctcctgaagcaccaggcggtcagcagctgcccttggcaccctccagccctcagaagttgcgtaggagacacagcgcctccactgaggcacctctctgggaataacgttccccagcaccccaaatggatttccagtcaattcagaa

SEQ ID NO: 2542 - DNA, 70 bp, Homo sapiens
  source 1..70: mol_type = other DNA
tcaggagactcttctcaaactgtccttatgtgagtgcactgccatttcttgcagggaccctgactgacac

SEQ ID NO: 2543 - DNA, 279 bp, Homo sapiens
  source 1..279: mol_type = other DNA
cctggggtgggatctcaggcagaggttttgtcccctctgaggctcccccacaacacgcctctgttgttccagctttgctgtgtgaccctggtccccggtgaggtaacaccaccactgagctttatccctgcagcctgggggtcctattcacctctgggctgtctcagggtgccatctgtctctttccagctgcttccctcgccagcgctatcaatccccccattcaatttctgctgttgaaatattcagtgtttctgtatccctagttggacctgagtg

SEQ ID NO: 2544 - DNA, 290 bp, Homo sapiens
  source 1..290: mol_type = other DNA
agcttttccatgaggacagggcttccccactggccctctcaaatgatgattgtttttcctgccaaaccagtggtaccacagcgtctggagtaggggctggcaccttctttgttcttcattgcctctcccaaaccattgtacttgctcactcttccaacttttagttttggcctcatattatcagtttatagtaatcaatcatcaatcatctactgacccctaaaaagtcattccccatttagtccttgaagattgtatctcctcgcttgttctctttccaataatcctcc

SEQ ID NO: 2545 - DNA, 148 bp, Homo sapiens
  source 1..148: mol_type = other DNA
ctgacatactatctaaattttttattccatgtctttcctaccataatatggtatcaataaggaaaaacattttgtagtgctcacagtttacaaccacagcccagaagttactgcccggcagtcattcatagtcactcaaggaatgtat

SEQ ID NO: 2546 - DNA, 167 bp, Homo sapiens
  source 1..167: mol_type = other DNA
acttgtgcagactgttcactgcccaatggcactgaactatcatgccatttagtagctggaatacagtccatgttctgcttaccaagctgtatgtggctatacctgtctgaatgtagggctatttctctaatttcctcatatgtacacatgggctaacagcaggcttg

SEQ ID NO: 2547 - DNA, 109 bp, Homo sapiens
  source 1..109: mol_type = other DNA
cctcctccctcagacctgagtgtccagggccctagcccgtcctccctcagacccaggaggagtccaggggcccagcccctccaccctcggacccaggcgccaggctcac

SEQ ID NO: 2548 - DNA, 155 bp, Homo sapiens
  source 1..155: mol_type = other DNA
ttacccactccggaaccttgacctgtgacttcctctgagcctccttccttcctgaaatggaggtgataacatcacccacccctagaattgtgaccatcaaatccggtaaagcacttagtacataataagtgctccgtataaaataggtttaatta

SEQ ID NO: 2549 - DNA, 311 bp, Homo sapiens
  source 1..311: mol_type = other DNA
gccgggcgcggtggctcacgcctgtaatcccaacactttgggaggcctaggcgggtggatcaactgagttcaggagttcgagaccagactgactaacatggcgaaaccccgtctctactaaaaatacaaaaattggtcgtgatggtgcgcacctgtaatcccaactactgtggaggctgaggcaggagaatcgcttgaacccgggaggcagaggttgcagtgagccgagatcgcgccattgcactccagcctgggccacagagcgaaagcgagactccgtctcaaaaaaaaaaaaaaaaagagagagagaa

SEQ ID NO: 2550 - DNA, 362 bp, Homo sapiens
  source 1..362: mol_type = other DNA
ttctcaatgtatcaagccttctccccaccaacagatctatggctgtgctattttcttggccttggcctttttctatttctttctatactctctatcctcctctaggactcagctcagctgtcccctccgccaggaagtttttcccgactcccagtccaagctaggtgtccctgctgtgcttccctagccccatgggcttcccaaacccaatccactttaggttgtccctgactggcaacggtgtgtgtcccccaatggactgtgagccccaggagggcaagacctgaggctcagtccctatagtgtccccaactcccagcacagttgggtaggtgcttagcacatttttttgagtgaattaa

SEQ ID NO: 2551 - DNA, 326 bp, Homo sapiens
  source 1..326: mol_type = other DNA
gtcgggtgcgatggctcatgcctgtaatcccagcactttgggaggccgaggtgggtggatcacctgaggtcaggcattcaagaccagtctggccaacgtggcgaaaccccgtctctactaaaaaatatatatatatatatacaaaaaattagctaggcatggtggtgggcacctgtgatcccagctactcgggaggctgaggcaggagaatcgcttgaacctggaaagtggacattgcagtgagctgagattgtgccactgcactccagcctgggcaacacagcgagactctgtctcaaaaaaaaaaaaaaaagaaagaaaaaaaa

SEQ ID NO: 2552 - DNA, 162 bp, Homo sapiens
  source 1..162: mol_type = other DNA
ctgggagtggtggcacgcacctatggtcccagctactcaggaggctgaggtgggaggattgcttgagcctggaagtttgaggctgcagtgagctatgatcgtaccgctgcactccactttcggtgacagagtaagaccctgtctcaaaaaaaaaaaaaaaaa

SEQ ID NO: 2553 - DNA, 97 bp, Homo sapiens
  source 1..97: mol_type = other DNA
ctagtgtttaaactcaatcgggacaggatgtctgtcgtcaccagcaccgagacagttcctgggactcagtagacgctcaataaacgtttgaatgaac

SEQ ID NO: 2554 - DNA, 70 bp, Homo sapiens
  source 1..70: mol_type = other DNA
ccagttgtgtgactcgcaggtccgttccctccctgggctccggcttttcctgctatgaaaaggggtggga

SEQ ID NO: 2555 - DNA, 90 bp, Homo sapiens
  source 1..90: mol_type = other DNA
gtcctacctctaccactgacttgctgggtgacctgggccaacttccttcccctgtctgggcctcggtctcctcgtctgtgaactacggag

SEQ ID NO: 2556 - DNA, 296 bp, Homo sapiens
  source 1..296: mol_type = other DNA
gccaggcgcggtggctcaggcctgtaatcctagcactttgggaggccaaggcaggcagatcacaaggtcaagagattgagaccagcctggccaacacgttgaaaccccgtctctactaaaaatacaaaaattagctgggcatggtgccatgcacctgtatttccagctacttgggagaatcacttgaacacaggacgcagaggttgcagtgagtgagatcacgccgctgcactccagcctgggcgacagagcgagactccctctcaaaaaagaaaagaaaagaaaagaaaagaaaa

SEQ ID NO: 2557 - DNA, 154 bp, Homo sapiens
  source 1..154: mol_type = other DNA
tgtgtgtttgcgtgactgtgtaggtgccctctcctgggaacgtcaccttccatgagggcagatgtatttgtctattttgttctctatggtaatgcccagtgcctagaacagggctgggcacatagtaggtgctcaataaatatttgaatgaatg

SEQ ID NO: 2558 - DNA, 291 bp, Homo sapiens
  source 1..291: mol_type = other DNA
gccgggcacggtggctcatgcctgtaatcccatcactttgggaggccaaggcgagcagatcacctgagatgcggagttcgagaccagcctggccaacatggtgaaaccccgtctctactcaaatacaaaaattagctgggcgtggtggcgcgtgcctgcagtcccagctactcaggaggctgaggcacgagaatcacttcaacccaggaggtggaggttgcagtgagctgagatctcaccactgcactccagcctgggcgacagagcaagattctatcaaaaaagaaagaa

SEQ ID NO: 2559 - DNA, 303 bp, Homo sapiens
  source 1..303: mol_type = other DNA
gccggacgcggtggctcacgcctgtaatcccaacccagcactctgggaggccggggcggacagatcacttgagatcaagaatttgagaccagcctggccaacatggtgaaaccccgtctctactaaaaatacaaaaattaacggggtgtggtggcacatgcctgtaatcccagctacctgggagactgagctgagagaatcactttaacccaggaggcggaggttgcagtgagccaagatcgtgctactgcactccagcctgggcgacagaccaagactccgtctcaaacaaacaaacaaaaa

SEQ ID NO: 2560 - DNA, 1438 bp, Homo sapiens
  source 1..1438: mol_type = other DNA
ccttggcccttcctccctcagacccagaggtccagacccctagcacctcctccctcagaccccggagtccaggcccccaggccctacttcctcagacccaggagtccagacctcagcccctcctccctcagacctaggagtccaggcccccagcccctctgccctcagacccaggagtccaggtccccagcccctcctccctcagacccagaagtccaggctccggcacctcctccctcagacccaggaatccaagtccccaacccctcctccttcagacccaggggtccaggctcccagcccctcttccctcagacccaggagtccaggctctggcacctcctccctcagacccaggagtccaggcccccaggccctactttctcagacccaggagtccagacctcagcccctcctccctcagacccaggagtccaggctcccagcccctcctccctcagacccaggagtccaggcccccatcccctcctccctcagacccaggagtccaggcccccagcccctcctccctcagacccaggagtccaggctcccagcacctcctccctcagacccaggagtccaggcccccaggccctacttcctcggacccaggagtccagacctcagcccctcctccctcagacccaggagtccaggcccccagcccctcctccctcagacccaggagtccaggctcccagcacctcctccctcagacccaggagtccaggcccccaggccctacttcctcggacccaggagtccagacctcagcccctcctccctcagacccaggagtccaggcccccagcccctcctccctcagacccaggagtccaggctcccagcccttcctccctcagacccaggagtccaggcccccaggccctacttcctcggacccaggagtccagacctcagcccctcctccctcagacccaggagtccaggcccccagcccctcctccctcagacccaggagtccaggctcccagcccctcctccctcagacccaggagtccaggctcccagcccctcctccctcagacccaggagtccaggctcccagcccttcctccctcagacccaggagtccaggcccccaggccctacttcctcggacccaggagtccaggctcccagcccttcctccctcagacccaggagtccaggcccccaggccctacttcctcggacccaggagtccaggctcccagcccttcctccctcagacccaggagtccaggcccccaggccctacttcctcagacccaggagtccagacctcagcccctcctccctcagacccaggagtccaggcccccagcacctcctccctcagacccaggagtccaagtccccaacccctcctccctgagacccaggggtccaggctcccagctcttctctccctgcagagtctgggggccgggcc

SEQ ID NO: 2561 - DNA, 250 bp, Homo sapiens
  source 1..250: mol_type = other DNA
gggattgggaggggagaacagcagcgtgggcggctggcagaggcagggaaagaccagcagagaggaaagagaaactgggagagggaggaagggagaaagtgagaagggaaatcggaaagagaaaagggaggaaacggcagagccagagagaaagaggaagagactgagtgtgaaggagagaggacacaggggatgactgagagacagagagagagagagagagagaatgagacagagacttaaggaagag

SEQ ID NO: 2562 - DNA, 47 bp, Homo sapiens
  source 1..47: mol_type = other DNA
cttgctgtgtgacctgaggccctcactgagcctcaatttcctcatct

SEQ ID NO: 2563 - DNA, 309 bp, Homo sapiens
  source 1..309: mol_type = other DNA
gcccggcgcggtggctcacgcctgtaatctcagcactttgggaagccaaggcgggcgaatcacttgaggtcaggagttcgagaacagcctggcccacagggtgaaactctttctctactaaaaatacaaaaattagcggggcgtggttgcgggcacctgtaatcccagctactcgggaggctgaggcaggagaatcgcttgaacccgggaagcggaggttgtagtgagccgagatcgcgccactgcactccagcctgggcgacagggcgagactcccgtttcgaaaaaacaaacaaacaaaaaacaaaa

SEQ ID NO: 2564 - DNA, 297 bp, Homo sapiens
  source 1..297: mol_type = other DNA
gggcgcagtggctcacccctgtaatctcagcactttgggtggccaaggcgggcagatgacttgaggtcaggagttcgagaccagcctggccaacatggtgaaaccccgtctctactaaaaatacaaaaattagtcaggtgtggtggacgcctgtgatctcaatctcagctactcgggaggctgaggcaggagaatcacttgaacccaggaggtgttgcagtgaaccaagatcacaccactgcactccagcctaggcaacagagactctgtctcaaaaaaaaaaaaaaaaaaaaagaa

SEQ ID NO: 2565 - DNA, 296 bp, Homo sapiens
  source 1..296: mol_type = other DNA
cctgtaatcccagcacttagggaggctgaggtgggtggatcatgaggtcaggagagcgagacaatcctggctaacacagtgaagccctgtctctactaaaaatacaaaaaattagctgggtgcgatggcaggcacctgtagtcccagctactcaggaggctgaagcaggagaatcgcttgaacccaggaggtagaggttgcagtgagccaggactgcgccaccacactccagcctgggcgacagagtgagactccatctcaaagaaaagaaaagaaaagaaaagaaaagaaaagaa

SEQ ID NO: 2566 - DNA, 62 bp, Homo sapiens
  source 1..62: mol_type = other DNA
tgtcatctgccctgtctggttacagtcatcatcgatggcctgaatggggagagacagaagac

SEQ ID NO: 2567 - DNA, 30 bp, Homo sapiens
  source 1..30: mol_type = other DNA
gttctggaaggcagggaccaggtctgtctt

SEQ ID NO: 2568 - DNA, 299 bp, Homo sapiens
  source 1..299: mol_type = other DNA
gctgggcgcagtggctcacacctgtaatcctagcactttgggaggttgaggcaggtggatcacaaggtcaggagtttgagaccagcctggccaatatggtgaaacaccatatctactataaatacaaaaaaattagccaggcgtggtggcacatgcctgcaatcccagctactcgggaggctgaggcaggagaattgcttgaatccaggaggcagaggttgttgcagtgagctgagatcgcgccactgcactccaacctgggtgacagagcgagactccgtctcaaaaaaaaaaaaaaa

SEQ ID NO: 2569 - DNA, 296 bp, Homo sapiens
  source 1..296: mol_type = other DNA
ggccaggcgtagtggctcatgcctgtaatcccagcacgtttggagaacgaggcaggcagactgcttgactccagaatttcgagaccagtttggacaacatggcaacactcctgtgtctacaaaaaaaaatacaagaaataagtcaaggcatggtggaacacatctgtagtcccagctacccaggaggctgtggtgggacgatcacctgaacttaagaggttgaggctgcagtgagccataatcgcaccactgcattccggcctgggcgacagtgtgagaggctgtctcaaaaataa

SEQ ID NO: 2570 - DNA, 171 bp, Homo sapiens
  source 1..171: mol_type = other DNA
gcagggtacagtggctcatgcttgtaatcccaccactttcggaagcagaggaaggaggatcacttgagaccaggagtttgaggctatgagttaagccacgattgccactgatgattgccactctacgacagcctgggtgacagagcaagaccctgtttaaaaaaaaaaaaa

SEQ ID NO: 2571 - DNA, 345 bp, Homo sapiens
  source 1..345: mol_type = other DNA
gccgggtacagtgactcatgcctgtaatcccagaactttgggaggctgaggcgggtggatcacctgagctgggaagagcagttctgccctcaaagtcaaggatgcagcgacctaaaactgcaccactgccatctagcctgggcagcagagtgaaaccctgtctctaaaaaaattaaaaatgaggccaggcgcggaggctcacgcctgtaatcctagcacttggggaggccgatgcagaagaattgcttgaatccaggaagcgaaggttgcagtgagccgagatcgcggcattgcactccagcctgggtgacagagcgagactctatcaaaaaaaaaaaaagaaaa

SEQ ID NO: 2572 - DNA, 293 bp, Homo sapiens
  source 1..293: mol_type = other DNA
caggcacgatggctcacgcctgtaatcctagcactttgggagggcaaggtcggcagatcgcctgaagtcaggagttcgagaccagcttggcccacatggtaaaaccctgtctctactaacaatgcaaaaaattagccgggagtggtggagggcacctgtaatcccaactactcggtatgctgaggcaggagaatgccttgaacccgggaggcagacgttgcagtgacaccagatcgcaccattgcactccagcctgaacaacaagagcaaaactccatctcaaaaaaaaaaaa

SEQ ID NO: 2573 - DNA, 298 bp, Homo sapiens
  source 1..298: mol_type = other DNA
gccgggtgcgatggatcatgcctgatattgcagctttttgggaggtcgaggcaggtggaggtctcaggagtttgagaccagcctggccaacatggtgaaactccatttctactaaaaatacaaaaaattacctgggcatggtgacaggcacctgtagtcccagcaacttgggaggcagaggcaggagaatagcttgaacccgggaggaggaggttgtggtgagctgagatctcaccattgcactccagtctgggcaacaagagcaaaactccatcttaaaaaaaaaaaaaaaaaaaaa

SEQ ID NO: 2574 - DNA, 303 bp, Homo sapiens
  source 1..303: mol_type = other DNA
gggcgtggtgcctcacgcctataatcccagcactttgggaggccgaggtgggcagatcacctgaggtcgggagttcgagaccagcctgactaacatggaaaaaccccgtctctactaaaaatacaaaaattagccgggtgtgttggcgcatgcctgtaataccagctgctcgggaggctgaggcaggagagttgcttgaacccgagaggcagaggttgtggtgagccgagatcacgccattgcactccagcctgggcaacaagagcaaaactccatctcgaaaaaaaaaaaaagaaaaagaaa

SEQ ID NO: 2575 - DNA, 274 bp, Homo sapiens
  source 1..274: mol_type = other DNA
ggccaggcgcggtggctcacacctgtaatcccagcactttgggaggccgaggtgagtggatcacaaggtcaggagatcgagacaatcctggctaacacggtgaaaccccgcctctactaaaaaaatacgaaaaagtttgcgtgtcgtggtggcgggcacctgtagtcccagctactcgggaggctgagcttgcagtgagctgagatcgcgccactgcactccagccttggcgacagagcgagactctgtctcaaaaaaacccaaaaaaacaaaa

SEQ ID NO: 2576 - DNA, 128 bp, Homo sapiens
  source 1..128: mol_type = other DNA
ttggctgtgtttttgtagttacctattttcacactgtgagcttcccgagaatggggcctgggtttgattcatctgttttctacagggtttaagtctcaggaggtctcaataaacttggtatataaatg

SEQ ID NO: 2577 - DNA, 98 bp, Homo sapiens
  source 1..98: mol_type = other DNA
ggttactgccttaccctgggcctcagtttccccaccttccaaagggaggagcatcattccttccttaccccctttctagctgtgtgatgtagaccaaa

SEQ ID NO: 2578 - DNA, 107 bp, Homo sapiens
  source 1..107: mol_type = other DNA
ggcctgggaaccagtcggaactgggttccagtccagctgtgctgtgtgagcctgtgcaagtgacatgacctctctaaaccttggttttctgctctctggagcggtga

SEQ ID NO: 2579 - DNA, 51 bp, Homo sapiens
  source 1..51: mol_type = other DNA
gtggcgtggcctctctgagccttagtttcctcatctgcaaaatggaagcag

SEQ ID NO: 2580 - DNA, 223 bp, Homo sapiens
  source 1..223: mol_type = other DNA
ccatcattttgcaaggctgaagcaagacgatcacttgagctccggagttcaagaccagcctgggcaatacagtgaggctcccataactctacagaaaaaaaaaaagaaaagaaaaattagctggtgtggtggtacgcacctgtgttctcagctacttgggaggctgaggtaggaggatcgcttaagcccaggaagttgaggctgcagtaagccgtttgtgcca

SEQ ID NO: 2581 - DNA, 623 bp, Homo sapiens
  source 1..623: mol_type = other DNA
tgacataggagttaaaaagaaattatttaggcagatagtgagggtaaggaaatccccggtaaggttttccttttaatgaaaagcagcccccaagtcatttcttttctaacaaacagcagcctgaaaaatcaagctgcagacatagataagcaagctggaagtttgcacgggtgaatgccagcagctgtgccaataggaaaaagctacctgggggccaggcatgtccaacatcgcagctccatcttcccttttctttgtcaaccacgtgtacagcaaggaacatacaacatggcccggtcagacagggactccatctgcataataaaagattagggtggggcagccagcttctgattggcacacctggtccaaccaatctttggggcctacgtaaatcagacaccacctcctgaagccagtctataaaccccgtgcccttcgccacggactggaagtcctacttgggagcccttttctctctgcaggagctagagctattctcttttctctttcgcctattaaacctccgctcttaaactcacttcttgtgtgtccacgtccttgattcccttggcgtgagacaacgaacctcaggtatttaccccagacaatgatgcagcttc

SEQ ID NO: 2582 - DNA, 509 bp, Homo sapiens
  source 1..509: mol_type = other DNA
gtggattcgtacgtagggaaaaggagtcaggctggtgggaccaggggaaagcaaagagataaagcaaataagctatagatctgcattttcttcatggtccaggatatataaacaaaaaaaggaagcagataagctataggcttgcttttctttatgacccaggacatacagccctgccgagcaaataatgaacgtaactcacaaacttcctgcttatcatcaaacgcacgcatccacttatcatcaaacacctcgggtgacagaagaatgcaggtcagctccctgctgccttggcattatcaatcagcccaggaaccatcctataaaatctccagcaagcctttgtttccttgcagtcagctcctcttccactgattctgcctgttgctccctgataacatactttgatactgtctttaataaatctgcctttcttcacccacagctgtcttggtaagttcttttacctctgtgccaccagcccaaacagttgctgctcacctgaaaca

SEQ ID NO: 2583 - DNA, 1884 bp, Homo sapiens
  source 1..1884: mol_type = other DNA
ctattttgaggaagctcaacaaaatccaagataacacagagcaggaattcagaatcctatcagataaattttaaaaagacattgaaataattaaagagaatcaagcagaaattctggagctgaaaaattcagttgacaaattaaagaatgcatcagagtctctcaacagcagaattgatcaagcagaagaaatagtgagcttgaagatgggctctttgaaaatatagtcagaggagtcaaagggaagaagaataataaagcatgcctacaggatctagtatatagacccaaaagggcatatctaggagttagtggcttaaagagaaggcagagagactggggtagaaagtgtattccgagatagtaacagagaactttccaaacctggagaaagatgtcaaaattcaagtacaaggaggttatagaacaccaagcagctttaatccaaagaaggctacctcagataatttaataaactcccaaatgtcagggataaagacatgatcctaaaagcagcaagagaaaagaaacaacataaaacggaactctaatacatctggcagcagattgctcagtggaaaccttataggccaggagagagaattatgatatatttaaagagctgaagaaaacaaaaacatttatcctggaatattatatccagtgaaaatgcccttcaaacaggaaggagaaataaagactttcctagacaaacaaaagctgagagattttgtcaacaccagacctctcctacaagaaagcctatagggagttcatcagtctgaaagaaaaggatgctaatgacgaataaaaagtcatctgaacatacaacactcactagcaatagtaactgcacagataaatacaaaatattataatactgtaattgtgatgtgtaaactactcatatcttaagtaggaagactaaaagacggactgacaaaaaaacggcaactacaacaactcaagacacacagtattaaaatataaacaacaaaaagtttaaaagcagaggagataaatttaaagtatagggtttttattagttttctctttgcttgtttgttggtttgtttttgcaaagttaaattgtcatcagtttaaattaatgggttataagatattatttacgagcctcatgctgacctcaaataaaaaatatgtaagagatacacaaaaaatataattcaagaaatcactttcacaaggaagacaagaaggaaaaagaaaaggccacaaaacaaccaaaacaaataacaaaatgtcagtagtaggtctctacttataaatattaaatgtacatggactaaatctccagtcaaaagccacagagtggctggatgaatttttaaaaagactcaatgatctgttccctataagaaacatgatttgcctataaagacacacatagactaaaaataaagggagggaaaaaaaatcccatgcaaatgaaaaccaaaaaagagcaggagcagctatatttagataaaatagagcttaagacaaaaagtatggaaagatacaaagaaagtcatataatgctaaaaggatcaattcagcaaagggatataacaattgtaaatatatacacacccaacaatggagcaccgagatacataaagcaaatattttcagagctaaagagagagacagaccacaatacaataattgttggagacttaaccacttcattttcagcattgcacaaatcatccagacagaaaatcaacaaagaaacatcggacctaatggacctaatagatatttacagacaatttcatccaataactacaggttacacattctgctcagcacatggatcattctcaggtatagaccatgaaatattaggacacaagacaagtcttaaaaatccaaaaaaaa

SEQ ID NO: 2584 - DNA, 104 bp, Homo sapiens
  source 1..104: mol_type = other DNA
tttcattcctcatctcatctttttcttagcagcattcaatgaatccttcattctagaaacactctatatctttggttttcatgagaccattctcaccttgtttt

SEQ ID NO: 2585 - DNA, 449 bp, Homo sapiens
  source 1..449: mol_type = other DNA
caacagcccaaagttggaaggagcacaagtgttcactgatggatgaatggataaacagaatgtgatctaaacataccatgaaatattatccagcctttaaaaggggaggaagttctgatgcatgctacaacatgaatgaaccttgaggacattatacaagtgaaataagccaggcagagaaggataaatgctgtatgattctactcatatgaggtacctagagtagtcaaactgatagagaaagtagaatgttggttgctaggagctgtggggatgggaagatgggaagtcgtttaatgggtagagtttcagatctgcaagatgaaaagggttctagtgatggatggtagtgatggcttgcaccacaatgtgaatgtactttactaactgcacatttcaacatggttaagatagcaaattttcattgtgttttttaccagaatttaaaa

SEQ ID NO: 2586 - DNA, 455 bp, Homo sapiens
  source 1..455: mol_type = other DNA
gtgcaggatgatgccacttcatcttggatgctaatctgccatgttgacttctgattaaccccaggcccaggaatgcctcaagatttctactttacttactgttgcttgtgtaagccaagacaaccttgatgttatcataaacatgtacttacctaagtcctgtcctttggcaaattatgggctatgagacacagcattcttgcctttccctgaggggtcaatttcagcgatcctacacattccttctgaagcacttatgctctttctatatggtatgtaagctctcggtctggggagtaacagtgcagagatctacctgtcttgttgccacatgtttctaaactttccaataaatcaccttctactgacaaactggatttgtcttccttattctttggtttcttggttcctttttggtatggatttgctttccctatgtggttctttcatgaaac

SEQ ID NO: 2587 - DNA, 134 bp, Homo sapiens
  source 1..134: mol_type = other DNA
gtgcacagaaacaagatgaagaaaatatatcaagatgttaaccacactctttggatggtgaaaacatgggtgagtttctcttctacatttctgtaacttcaaagtttctataatgaacacatttcatatataat

SEQ ID NO: 2588 - DNA, 353 bp, Homo sapiens
  source 1..353: mol_type = other DNA
ggctgggcatggtggctcacacctgtaatcccagtgctttgggagcgcaaggcaggaggacgacttgatgctgggtcaagaccagcctgggccatatatatagcaagaccttatctctaaaaaaaaaaaaaaaaaaaaaaaaaaaaaaaaaaaaaagattagctggtcatgatagcgcataccagtagtcctagctattctggaggcagaggtgggagaactgcttgagcccaagaattcaaaactgaggtgtgaggatcacttgagcccaggagtttgagttgattgtaccattacactccagcctacgtaacacagtaagaccctgtctcttaaaaaaagaaaaaaagaaa

SEQ ID NO: 2589 - DNA, 807 bp, Homo sapiens
  source 1..807: mol_type = other DNA
gacacagactgaaagcgaaggaatagaatatattccatgcaaatggaaaccaaaagcaagcaggagtagctatacattttttttcttttttcttttcttttttttttttttttaccacaatcatgactatataaggagtagctatacttacgataagagactttgtatcaaacacagtagggatgaaatcaggaagaggatacaaaaattgtaaatatatatgcacccaatatcagagcacccagatatgtaaggcaaatattattagatctaaaggggaagacaatacaataatacaataatacttgtggacttcaacaccctactttcagcaatggacagatcatatacatagaaaatcaacaaagaaacaccaagtttaaactgactttagaccaaatggacttaaaagacactaacagatcttttcatccaacagctacagaatacatattttttttcataagcacatgcaatattttcaaggagaggccacatgttaaaccacaaaacaaatcacaaaaattaaaagaattaaaatcacatcaagtacctttctgaccacaatgaaataaacctagaaatcaataacaagaggaacttttaaagcagcacaaataaatggaaattaaataacatgattctgaatgaccaatgggtaatgaagaaattaagaaacaaaatttaaatgtcttaaaatgagtgaaaacagaaacacaacatataaaaatgtatgggatgcagcaagagcagttttaagagggaagtatttagtaataaacacctacatcaaaaacaagaaagatc

SEQ ID NO: 2590 - DNA, 164 bp, Homo sapiens
  source 1..164: mol_type = other DNA
gtccctggcctcctgtatactggatgtgaatggatacaattatatattgtgtttatagttttcctgtgctataggaacagtattcgaatctgatgcaaaggacaacacaccctagagattgtaacagtgagatgaaccaagtgattggatggggttttgagttg

SEQ ID NO: 2591 - DNA, 547 bp, Homo sapiens
  source 1..547: mol_type = other DNA
tcctatatgatccagcaccaccatttctgagtatataccctataagaattgaaagtagaatcttgaatagacacttgtacactcatcttcatagcagcattatttcaataggcaaaaggtggaagtagcccaagtatccactaacagatgaatggataaataaatgtggtatataaataccatagaatattatttcacctaaaaaggaaggatattctgacacattatacaacatgggtgaaccgtgaagaccttatcctaagtgaaataagccagtctcaaaagataaatactgtagaatccacttatatgaggtacaaatatatatcaaattcatagatatctattggtacctcatataagtaccatagagtatagaaatatagttgagacatttctggggaagtagggaaggggaatgagttgttgttaatgggtacagcattttacttcttggtaagaggaaaaatgttctggagattagttgcataaaaatgtggaatttatataacattactacccaattacaatagtcaatggtaaactt

SEQ ID NO: 2592 - DNA, 2715 bp, Homo sapiens
  source 1..2715: mol_type = other DNA
gtggctcagaaagagactccttctgcttgaggaaaggagagggaagagtacagatgactttgtttttcaacttgagtaccagctcagtcataggaaaataaagcgccaagtagaatcctgaagccaccgatcccaggcctttcttcctggacagtgcggctagacccaacccaggccagaagggaatctgctgtcctggttggttggacacaagttctggctggttttaccacctgctgactaaagtggcctcaagccttgaataaacgtcagtggcagtcaggtagtactgactgtggaccttgggcaatccccagtactgtgctggtcatagagtccatgggtttagactagcattactgtgatgccagctgtgatggacacaggagtccctgtgtcacgtctcccccaattacaggcagcctggtatatatagagggacttcttatacttcggggaatgagagagaagagagtaagggactttgcctgggaacccagaacattgtcttctctttcccacatctatctaggctgggtatctaggagtctgcaagatttattgcatacttgggattatggcaccctctagtgctgaaatggctgcagtgaccacagcttagggaactcagcactcagtcccctttgaattctttgaaggccctctgaagaagaatgagtacaagcaaggccagactgtgaagactggaataaataagaaactcttcagtgttcagacatgtacaaatatccacaagtattgagaacattcaagaaaatatgatctcatcaaatggactaaataagctgcccagtgaccagccctggagtgatagagatctatcagatagggaatacctttcagacagggaattcaaaatatctgtcttgaagaagctcaaagaatgtcaagaaaacatgaagaaagaattcagaattttagcagagaaatttaacaaagagattgaaataattaccaaaaaaaaaaaaaaaaatcaaacagaaatcctagtgctgaaaaagacaatggatgaactgaaaaatacatcagaatataacaacagcataattgattaagcagaagaatttgttagcttaaatacaggctattgaaaatacagaggagaaaaaagaaaaagaatgaactgtgcttaaaagatatagaaaatagccacaaaagggcaagtctaagagtgattacctttaaaaagggagtagagaaagatgtagggatagacagttaattcaaagaaataattatagagtactttccaaatatatatatattcatatatatgattcatattcatatatatattcatatagatatatgattcatattcatatatatatgaatatccaggtataagaaagtcaaagaatgccaaccagattcaacacaagacatataacaatcaaactctcaaaggtcaaagatgaaaaagaggaaaggtagcaagagaaaagaaacaaataacatataaaggaactccagtagattggcagcagtcttctcagcagaaatctcataggccagaagaaagtgaaaagacgtatttaaagtgctgaagggaaccatcttcaaccaagaatattctagtcatcaaatatattcttcaaccatgaaggcgaaataaaggctttcccagcaaacaaaagctgagggaattcatcaataccaggcctgtcttacaagaaatagtaaagagagttcatcagtctgaaagaaaagaatgctaatgtgcaacaagaaatcatctgaaggagtaaaacttactggcaaaagtaaatacacagacaaattgagaatattttaacactgtagttctggtgtgtgaacccctcatatctttagtgtgagcactaaaatacaaatctgtcaagaatgatgactgaatagctttttaggagatatataaaaagatataaagtgagacaacgaaaagaaaaggagtgatgagttatagtgtagagatttttagtttattctttgcttatttcttttcattgtgatcaaagtcaagttgtcatcagtttaaaataacttgctgtaactgtaagatactttttatgtctcatggcaaccataatgcaaaaatttatagtagagatactaaaaacaaaaagcaaaggattaaatcatactaccagagaaaatcacttatccacaaaaaagggagtaagaaaattagagaagacttagaaaacaaataacaaaatggaagtagtaagtccctaactataaatataagatttaatgtaaatggatgaaattcttcaactaaaagacatagagtagttgaatggattgaaaaaaaaaaagacccaactatatgctgcctacaagaaaactcactacacctataaagatgtacagactgagagtgaagggatagaaaaagatatgccatgcaaatgaaaaccaaaatggaacaggtctagctatatttatatcaggtaaaataattatttttaaataatgcagtttttcaagttaaaaactaaaaaagagaaagtaattatataatgaaaaaagtcaatttagaaagatgtaacaattgtaaatatatatgaccccaacattagggcacgcacaaacacataaagcaaatattagtagatcaaaaggatagacttcaatacagtaataccagagaacttcaacacctcatcttcagcaatgggcagatcattcagagaatacattaacaaagaa

SEQ ID NO: 2593 - DNA, 336 bp, Homo sapiens
  source 1..336: mol_type = other DNA
acttacagaataactgaatgaggagctttgcagacctgttacacagccaaaagggtgaaaattataaaaacacaattcagtctctggaaatggtcataagggtgtatgggaaataaatatttattaaagaagatctaacattcacaagaacagcaaaagtgagtcacatttgaaccaagaccactcctttcctcccccaactccaaactcagcgagatcaaaactccattcgacgggtacagccaagaatacagggctccctctctctggagctccaaggcagagggctgtcttctcaggaaggacaatctgtcaggaattctcatcttgcctcca

SEQ ID NO: 2594 - DNA, 4697 bp, Homo sapiens
  source 1..4697: mol_type = other DNA
ggggtgaagatttgcttacggcataggatatgagacttacaaattaaactattggcaatccaggatttaaaatgttaaagaaaatgagatatcagagcagacaaggcttaggaaagtccctacaggaaaaccctgatcctatatcaataactgggcaaacagatagaaaagggctaggtcgtcagatttctgatgtgggtcattgatatttctcctccacccactgctttgccactagagtggctaacaaacctgtatgggtggatcaatggcccctttcacaggagaaactaactcaactccatcagctagtaaaagagcgattggatgcaggacatattgaagagtcagcccctggaattcaccagtatttgtaataccaaaaaagtcaggaaaatggggactgctacatgatttgagagctattaatgcacagattaaaccaatgggtgcattacagcaaggtctgccatccctggcaggcatttccaagagactggcctcttgtagtaatagatcttattgttttttttactatactattacatcagcaggataggcctggatatgccttctctgtgccttctgttaatcaaagggagcctgtctcttgttatcaatggaaagttttgccccaaggcgtgcttaacagtcctacattatatcagaattttgtaggacaggcattaaaggagccttgtaatgtgtttcccactggctatgtcattcattatatggatgatattcttttggccgctcctacagatcaaatcttacatcagttattcagagaaacaaaacaggctttgactaaatggaatctcaaaatagctcctgaaaaggtgcaaaccacctccccataccagtacttaggcactattattactgaaagaagtgttcagcctcagaaagtagtcatctgtagggacagattacaaactttgaatgatttccaacaattatcaggggacattaattggctgcacccaatgctaggtattgctacttattaactcaaacacctttatcagaccctccaaggagattcttcattagactctcctcggcaacttactaaggaggcagaagctgaattatagcttgtagaacagatgcttcagcaacaacatgccacctggttacagccacaaaagcctttgcttctgtttattcttcctacctcccattctccaacaggacttttaggccaattcatacacaaatctgtaatagtattagaatggcttttttatccaatcagacagtgaaatctttgcaaatttatctttctttaattactcaacttataacaataggtaggcatagatcaaaaatgtttatgggatgtgatccagacaaaattattgttcccttggattcccaacaacaggccacagcatgggaaatgtcgactgcatggcaaatcactctcacagattttgtaggaataatagataaccattatccatcagacaaaattttgcaattttatgaagttcacccttttacccttcctgtaatcactcatcacaagcctattccaggcagacagacctattttactgatgactcttctaaaggctgtgcagctatttatggacctaagcatactgaaacaataaagacctctggagtttcagctcaatgctcagaattagtggcagttattcaagttttacagctcaccgctttatctcctattaacattgtctgtgattcagcctatattgtaaatgtagccagtcacattgagactgccactattaaaagcaccctagaaccagagctgtataatttgtttctaagacttcaacaagctgttcactctcatgctgctccttttcatatttctcatatttgctatcacacacaacttcctggaccactatctctaggtaacaataaagcagataaactaatcggttctgtatttcaacaagcccaatcttctcatgcattcctgcatcaaaacacctctgcccttactcgtatgtttcatctgccttgcagccaggcttgagctattgcgcaagcctaccccacttgccagcctgtccctggcgttgcacccatggaaggatgtaacccactaggcttggctccatatgaaatctggcagatggatgttacacatatagcagcctttggcaaactcagctatgttcatgtgactacagacacttactcccatatgctacatgtcacgtgccaaactggggaaacagctggtcatgtctgatgacattgtctgtcaccttttgcccatatgggggtccctacacaatgaaaaactgacaatggacctgcttatgttagtcatgcttttcaaaattttttacagttatgggcaatcactcataaaacagaaattccttacaatcctcaaggacaaggaatcatagagtgggcacatcaaacattacaatgcatgttgaaaaaacaaaaatggggactaggagaccagctaccacctcaaacaaaattacatttagccttatttactttaaattttttgactcctggtatggatattaagactctggcagaatgacattggcaaatgttagagggaaaaaggaaagtttacccaaaggtattacagaaatccccggaagaaggacaatggaaaggcccggtagacttactgatatggggacgagggtttgcttgtgtttttacaggagatggacaatccgtgtgggtgccctcaaggtgtgtgtgaccatggaacgggagactggagaaatccatggatctcaactgtgggcccagctcctccagtacgagccatgagctagttgaatctgaatgcaaagacagaacaaggaccgactggagtcacactgacatcaacccccataaaatggggacagctcaagaaaaccacacaggaagctgagaaactgctggagcaaaacccctgactccatgtttatggccatgctagctgtaatatcctgtgcggtatgttttccctgtgcagaggcaaaaacttattgggcatatattcctaacccaccagtagtacgaccggtactcgggagcaacactcctcctgagatatatcatgatcagggagcatggacaccaggacccctaactccccctgacagagagtgattagattctcagaacaatggtatcaattatactgcaccattggagggacttctttatgtgtcacccaggatgcatcactcaaccgcagttgccttgcaattcagtcccaagcatgcttgagttaccatggaaaaattatgtacctattaggccttagctctattaatattactggtgtagttactaatcactcctggccccatcacccaaattgtattgattgtacagaatgggctccctttgataattctcacccctgtccttggactcagtgtcttggccccttagctaaacaacagtccatgttaatgggagacattatcgactggggtccccatggtcatttagatgggagaagtgagaatcagacctcatggcataaattttgctggcactggtggcgaaacttgaacatctcttcgctacatcccaatctgctacacaacttgcttggcacagaatgggctttagcccacctttgcctcaatggcattatcaaggaaagagaggtccaattcaggagtcaatatggaagacagcactcccatttatgaatggcagcatttgggttgggacactatccaataatagtaataatgctcaatgcagttttaatgttacctttgtagaaaatactaccacacagtttacaatttgtatttttaatccgtatgtttttctagcagcaaaaaaggaccaactccgggtaaacaatgcccaatcgatttgtgatgcctgtcaactgtatcattgccttaatcatagcacaatacaaacacacagcatatccaccctaataattctaggtcacattcctggattatagattcctgtaaatctgtccgagccttgggaggccacccccgctttacattttgtaaaactccttcttattcagcttactcatcgtgctcgtagagctttaggcatgataatttttgctataatttccctagtcacactaataacctctgctgtgttgtcctcagtagcactgcacagctccattcaaacagctcaatgtgtgaaaaattggatgtgcacagccgaccaggaatggatgcttcaaaataaaattaacaccaagatacaaacagaagtggcaatgttaaagactactgttctgtggctaggataacaaatacaaagcctgaagttgcagcagcaattgcattgtcattttaaccctattcatatttgtgtaactaatttggaatataatcaaagtgaatatccaaggaactttgtaaaggcccatttacagggagttttacattcaatgttacttttgatattaatgattcacaaagtaaaatccttaacttgaataagcagactcaagtgcttcagccctctttaaaagcttgggcagaattccagcaaggtttagggagccttaacccttggacctacttcaaacagcacctcaatgtcttttttgtgattatcggaataatgttattatgtttctgttttttgttcatagtctgtaaaatcagctggaccaccaaccggcaattgagagctgcacagcctgcaattacctttattcaattaatacaaaaacagaaaagggg

SEQ ID NO: 2595 - DNA, 278 bp, Homo sapiens
  source 1..278: mol_type = other DNA
ggctgggcatggtggctcacacctgtaatcctagtgctttcaagggcgtatgctagaggattacttgaggccaggagttgaacatcagtcagggtaaaatagcaaaaccctatctctataaaaaattcttaaattacctgggctaatctcaggtactcgggaggctgaggcaggaggatcacttgagcccaggagtttgaggccgcagtgaggtatgaccatgccagtgtattccagcctgagtttcagagtgacatcatttccctaaaaaaataaaa

SEQ ID NO: 2596 - DNA, 1526 bp, Homo sapiens
  source 1..1526: mol_type = other DNA
gccatggctgcattttaacagcagtgaaatattactcatactacaagtattccatataactcacagggacaagagatagttgaaagagctcattgttaacttaaaaactcagttacaaaaacagaaagagggagaccaggtatataaaaccctacatatacaattacacctcgctttattaacattaaattttttaaatttacaaaaggatcagcccatgacagcagctgaacaacacttaacaggacaaaaggaaaataaaaatgccagacaagatatacagtggagggatgcacatacaaagagttgggaaaaaggaaaaataattacatggggaagaggatttgcttctgtctctccaagtgacaatcaggtgcctctgtgggtgcccaccaaacatctgaaggtctatcatgagccacaccaggaagagaggactctgggaagagccagaactccctatacgagtgatggcatgaatgaaaatctcagagacaaaggaaaagaccaagaatactcaccaggcagaccctccaacatggggacaaatcaggaaactggcacagatgcagaggacaatctgagagcacagaacaaatcaaaaacaactagtaacctaatggtggctatgatggtggtacttactgtggcggtaagcctccctactgtaaaagcaactcaaaattttacttattggacttatgtcccatttcctcctttaattaggtctgtgagttggatggaccctattattgaggtgtacaacaatgacagaacctcgatgcctgagcccatagataacagagtgccgatgcatcctaatgaggaagggatgaaaatgaatatatcaataggatataaatatcctccaatatgcctaggacctgctgctggatgcttacaaattggcacacaagtatggttggcagtaatccctggaaaaaataaatcacaggctactttatatatgatttcagggcaaagtttaaaatataaccattccagccctgaaactcagcagttctgaccagacaaactcgaatgtaaacaaaatagagtttggtttgaaggtgtggacgcttggcattggggaaattgtgtagcaagtaaggctggggtgctacaaaataattcctatggaatcgtcattgactggtcccctaaggggatttttaagaaaaattgcactgaagggccttcttataaaataagctgatggactcattggaaagagaaccatacacggtacattcagacggaagctgatgttcctattatatggagccctggtggcattatcacccctattccaaaaatgatatctcctgccataggacaggaacattcaggattatggaaattagctatggctcaaagttcaatcacaatttgggagggtaaatataataagtataaaggggagggaggtaaatataaatatgttctctcttttctttctaacaggaccttttggaatcaaaattgtgtccgaccaccttttacgttagcagtaggaaatattactc

SEQ ID NO: 2597 - DNA, 225 bp, Homo sapiens
  source 1..225: mol_type = other DNA
ttttcagaccgtgggtcccagcccatttagtaaaatgggaaatcaattagcaagtggtcaccagcattacacagcaatgaagcagaataaagtaggccagaatgcatcatgtagtaaaggcaaatactgttttgtgaaacttttcacccatacatctaaatgtgagaactggttgcaatgtaagacatttcttgctgggaagttgtgagcaaaataagttgaaaa

SEQ ID NO: 2598 - DNA, 302 bp, Homo sapiens
  source 1..302: mol_type = other DNA
ggccaggcacagtgcctcatgcctgtaatcgcagcactttgggaagccaaggcgggcagatcacttgagcccgggcattcgagaccagcctgggcaacatagggagaccccatctctacaaaaaatacaaaaattagccgggtccgcacttttagtcccagctacttgggaggctgaggtgggaggattgcttgagtccaggaggtggaggttgcagtgagccaagatcatgccactgcactccagcctaggtgacagagcaagaccctgtctttaaaaaacaaacaaaccaaaaaaaaaaa

SEQ ID NO: 2599 - DNA, 269 bp, Homo sapiens
  source 1..269: mol_type = other DNA
ggccaggtgcagtggctcatacatgtaatcccagcactttgggaggctgaggtgggaggatcacttgagcccaggagttcaagacaagcctgggcaacacagtgacactccatctctacaaaaaatttttacattagccaggcatggtggtgcatgctgtggcacctgaggctggggtgcagagaggtgggaggatcacttaagcccagaaggcttaagctatgactgcatcactgtctcaaaaaaaaaaaaaaaaaaagaaaaaaaaa

SEQ ID NO: 2600 - DNA, 150 bp, Homo sapiens
  source 1..150: mol_type = other DNA
ccaggggctggggatgagggagggatgaatgggtagagcacagagaatatttagggtagtggaactactctgtctgatactataatggtggatacatgacattgtacatttgtccaaatgcacagaatatacaacatcaggagtgaagcc

SEQ ID NO: 2601 - DNA, 529 bp, Homo sapiens
  source 1..529: mol_type = other DNA
tgaggtatgagaacagggtatggaggcaagaaacctaagggtgattaatgctgacttcctggaactgaatcaaaaggaaaacccaaactttccatgccccaaataacaaaaggatcagaggcaacccccgccttctgtgtcgcagatgaaaaatggaaagtacctcttcctgcaaccaatgagactggtcactggcctagttttcatctgcatagaggtgtaactttgtaacttcacttcagcctctgttggtcaccttccccaaccaatcagactagttatgggccactacttcatttacagaggatataaaccaagtaaccaatgggaaacctctcgggatttaaaccccagaaaattctgtaaccagtgctcttgagctgcttgctccagaccactcccattgtgtggagtgtactttcattttgataaatctatgctttttttgcttcattctttcattgttttatgcattttgtccaattctttgttcaaaatgccaagaacctgcacatcctccaccagtaac

SEQ ID NO: 2602 - DNA, 1376 bp, Homo sapiens
  source 1..1376: mol_type = other DNA
catcagtgtaactacaccctagagattattaacccctcacatgattacataagctaggcagttacccagactgtgtcatttagaaaacctgtatggttttcatggaaaccatccctagataaggacacttcaaaggatacacagtctaagtactgccaaggtaagcccactagctatgatcatattttcccttgggaagactgcactaatcctcagacatctagttatcttttggttccccagtacgaaacacctctggatgcttgttggtagacactaagcctaattacctccaatgggaaaacagaactgctggggcaactcagaatatttcccaaggtcctttccagcctttaactggggccaccttcatagggaccttaaccacttgggaaagtgaaaacaacaagctaacccacatgtttaccatagaaaattcttgtcttgaaaaactaggagccttttacctgtgtggaactagttcttacttatgtttaccagccaattggactagaacctttacacttgtttatttagcctgtgaaattaatatagctcccaagaaccaatccctcattatacctttaactgcaattgccagacacaaatgaaccatccaactcacatcccttttggtaggactacaaataaccgcgggactgggaatgggagtcagccgggttgtaacatccctatcctattaccaatgcttttccaaggattttatggaaagcttgaatgacattgcccaaagtaaaaaagaaaaaatagagacattggccaaagtatcatcaccatacgaaatcaaatagatgcctcagcagcagttgcttggcaaaacagaaggggatgagatctcctaactgctgtaaaggggggcttaggtctttttctagaggaagaatgctgtttttatgccgaacaatgaggattagtaacaaatgccacccaaaaactacccaactgggcctctaaaatacaacaacagctatctgagtcatggggctcctggtcaaaaatgctaagttggggttcatggctccttcctctggccagcccattagtaatgactatacttgccttggtttttggaccatgtttgttaaactcttaaccaaattcatttcctgtcacctagagaccatcaagcttcagatgatcatgtgacaatgtttccagccagttccaggtggagacaccacccctggccatcaagaagctatcctgtctccactagacagggcggggagagagtcctgtgattccccagtacgtagggactgtgcctcaggtcagcataaagcagttacagaagaaagactatcaatccctttacctcccataaagatttatgaggatcatgtctttcgggggga

SEQ ID NO: 2603 - DNA, 215 bp, Homo sapiens
  source 1..215: mol_type = other DNA
aaagaatgctgcaaccaacaggagaaggaaaagacagaaatgtgttttccatttggagcatccagagggagcacaaccatatcaacaccttgattttgatccagtgacattgattttggacttgtggcctccagaacttttagagaataaatttgcattgttttaagccaacaggttggtggaaattttttacagcagccacaggaagcaaacac

SEQ ID NO: 2604 - DNA, 514 bp, Homo sapiens
  source 1..514: mol_type = other DNA
gtcagaggcattcgacccagagcgactccattttgagtgagggctaggaaaatgaggctgggctgcattcccagaaaagtaggtattcctaacctctagatgtttacggttaagggaacaaattaataatgggtactaaaacagacccagacttgggagtgtccagatatcccggtatctagagaacaaaggcattcctaattttgctttaaaaataatatcgattcttgaaaaatacagtaagaaaattaatcctttttcacaaacccttgtagcagagcacatctccccaaaatctatttttagcccaaatatacacaagcattgtacctagggtgcatacgttcctcttactttcaggaacgtcctactgtctatggggtagctgtttcacaactttactttctcaacaaacttgcttttactttgcactgcggactcgccctgaattttttcttgcgcgagatccaagaaccctcccttggggtctgaatcggacccctttcctgtaaca

SEQ ID NO: 2605 - DNA, 4138 bp, Homo sapiens
  source 1..4138: mol_type = other DNA
gacctgaacgaggaaggtctgccagagcagagaaagtgaaactgatcagacgaactacgaacccctggacgggagagtctgccggcggagaatataaggtcagttccctgagaaggtatcgggagcgggaggtttctgaatcagggtaacatggggcagaatctgtctgttgaggagcaacattatgtgcagctgcttaaagttttacttaaacaatctggtgctcgggttagttctcaaacattaagcttctgcaggaggttattacacataacccatggtttctgcagacaggtactcttgctgtggaaaattgagactgagtaggagaaagattgaaacgagctcatcagaaagttcttaaagtggatccttctattttctctgcttggggtttggtctgtactgtcctcctgccattgtcctcttcttattctgccagacagcaggtgctatgttctgaatctcaaaaattgaaagaatcttttgtctcaccagcagcgcccattgaaaatgataaacaggagagggaggatgagaactggcctgtactgtcccctccagtagcagaaatagagaccccagtacaaaaaattctacatgctgtggccatagctggcgagccactaggaccttgcacttttcctattaccttaaggcctgatccaaataatccacagcagtttattcatgaacacactccagtaaaatttaaattattgaaagaattaaaagctagtgtggttaataatggaatacagagcccatttactttaggattgttagaatctgtattcagcactatgcgcctcccacccttggatataaagcatttagcttgcacttgtttctctgctagtgcatatttgacatggaatttaaattggcaagaaatgtgtgcagaccaggctagacagaatctcaccgctggacatgggaacattacagaggaaatgctattgggtagtgactcttattcagatctggtgcaacaattgacacttccagatgctgcttaccatcagtgcgcctggccgctaagcgtgcctgggccaccattcctgagaaaggggtctcaataaaatcttttccgcatatcatgcaaaaatcacaggagccctttgcacaatttattgcacagttacaacagtcagtgaggcatcagattcctcatactgctcctgcgaaaatgcttactttgaccctagcttttgaaaatgcaaatgcagattgtaaatgtgcattagcacccgtgagatgtacaaacagcttgggaaattttctcaaagcctgtcaggatgtgggaactgaactccatcgttcaactgtgttagctcaagtaatagctaatttagtagtgaacaaatctgaaaagggccaagggttgagccctaaagtgggaaaatgttataattgtggaaaaattggacatttcaaaaaagaataccatcagacctctgggcagaagggatcttacaatgcaataccgcccccccctccccgccccgctccccccaacacacacacacagaaaaaaaaacaccaggactttgccctcgccgtaataaaggaaatcattgggctaatcagtgttgctcaaaatttcatcagaatggcaccccgctctcaggaaatgagaatggggcctgggcccctcaaacaatgagggcattccccatccaggccacaaccctgctacaggggtgggttcctggaggaacattgactccctctcctctggaacaccggggagtgcaggattagatcgctcagtcagagaatgggtcacgttagttggaggagacaaacccaccagaattcccacaggcatttgggaacctttgccaacaggatatacaggattaattttaggccaaagccatctgaacttacagggcattactgtgatccctggattgttgactctgattatgaaggagaaattcaagtaattgtaatgtcacaagatctttgggtttttaaacctgggaaatatattgctcagctattgcttattattattctctgcaaattacacccttcttcacgaaaggagaaaagaggaaatcaagaatttgggagtacaactacacaggaaatttacctatcccaacccatagcttctaattgacccacctgtgcagtgcaaattaaaggaaagaagtgttgtgggtgtatggacacaggagcagatgtttcagtaatatccaaaaacaattggcccctgctactaacctctgcatccttagtgggagtaggaacagctcaaagtgtttaacagagtgctgaaattttactttgtgtcagtccagatggacagccatgtacttttcaaccttatgttgcaaatatacgtgttaatctctggggctgagatttacttacagcatgggatgtgagacttacaaatgaaaaggttgataatccaggatttaaaatattgaaggaaatgggatatcagagtgggaaaggcttgggaaagttcctacagggaaaccccggtccggtatcggtaactgggcaaacagataggaaagggctaggtcatcaggatttctgataggggtcattgatacttcttctccacccactgccttgctgctagagtggctgactgataaacctgtgtgggtggatcaatggcccctatcacaggagaaaactgactcaactccatcagctggtaagaaagcaattggatgcaggacatataaaagtatcagttagtgcttggaattcaccagtatttgtgacccccaaaacgtcaggaaaatggcaactgctgcataatttgagagctgttaatgcacaaattaaaccagtgggtgcattacagcaaggtctgccatccccggcaaccattccaagagattagcctcttgtagtaatagatcttaaagactgttttttcactataccattacacaagaaggacaagcctcaattcgccttctctgtgccttctattaatcagagagagcctgtctcttgtgatcaatgaaaagttttattaccccaggcatgctcaacagtcctacgttatgtcagcattttgtaggaaaagcattgaaggagcctcggaatatgttttccaccacctacatcattcattatatggataatattgttttggccactcctacagatcaagtattataccagttattcagagaaataaaatgggctttaactaaatggaatctcaaaatagctcctgaaaaggtacaaacaacctcctcataccaatacttagatactactgttactgaaaaaagtattcagcctcagaaagtagctcttcgtaagaacaaattacaaactctgaataacttaggggatattaattggctgcgcccaatgctaggtattgcttcttatcaactcactcatgtttatcaaaccctccaaggagattcttcattagattcccctcggcaacttactaaggaggcagaagctgaattacagcttgtagaaagatgcttcagcaacgacatgcctcctggctacaaccacaaaagtctttggttttgtttattcttcctaccccccattctccatcaggacttttagctcaattcatagacaaaactataatggtaatagaatggctttttttatccagtcaaacagtaaaatctttgcaagtttatcttgctttagtcacacaacttataacaataggcaggcatagatcaaaaatgcttacaggatatgatcctgataaaattattgttaccttggattcccaacaacaggctgcggcctgggagatgtccactgcatggcaaatcactttcgcagattttgtagaaataatagataaccattatccatcagacaaaattttgcagttttataaaattcacccttttattccccctgtgattgctcatcacaaacccatttcaggtggacagacctattttaccgatggctcttccaaaagccacacagccatttatggacctaaatatacttaaataataaagacccctagagtttcagctcaacactctgaattaatggcagttattcaagttttaaagctcacagctttatttcctattaatattgtctgtaattcagcctatgtcgtaaatgtagctagttgcattaaaactgccactatcaagag

SEQ ID NO: 2606 - DNA, 188 bp, Homo sapiens
  source 1..188: mol_type = other DNA
cctcaacccttggacctaccttaaacataacttcaatgtctcttttataataattacaagaataatgttgttatgtctctgtttttttgctcatagtctataggatcgggtgaaccaccaaccggcaattgaaagctgcacagcctgaaattacctttattcaattaatgcaaaaacaaaaggggaga

SEQ ID NO: 2607 - DNA, 427 bp, Homo sapiens
  source 1..427: mol_type = other DNA
gttggaggccgaaggaatgagggtcgtgaccaactcagtataccactggaggctctgtgagcaaacagcaaactgttctcatgaaagcaggatgttggcgaactgacaaactctgtctgccgccagaaggaatgctgggggcagtcatgtcccaggtcccgtgctccttgaggttatccacaggaacatccagaacctgttgaacaaagaaaggaatcatgtgggcctgtgttaaatcaaatagctgaccgacagttatcccttcctccctattcactctacctaataaatatgaagggctgtaaaagctcaggtccctgttccctaatatcaaggagccccctgaccccttctttcaaacagatccttttgtctgtctcatttctgcattcgtcgtccttcgttcggtccagaagcaaccgcgaca

SEQ ID NO: 2608 - DNA, 361 bp, Homo sapiens
  source 1..361: mol_type = other DNA
aattaaaaatatacatccacacaaacacctgtacatgaattttcacagcagtagcatttataatatcagagagttggaaacaaccccaatgtctatgaactaatgagtaaacaaactgtggtatatccatacaatgcagtattattcagccataaagaggaatgaaaaactgatacatgctacaacatggatgaactctgaaaacgttcagtggtaaaaagccagacacaagaaaccacatattgtatgactccatttatatgaagtgtccagaagaggcaaatctagacatataacgtggattagtggttgccagaggctggaggaagagcgaataggcagtgatgataaggggtatgag

SEQ ID NO: 2609 - DNA, 138 bp, Homo sapiens
  source 1..138: mol_type = other DNA
tctttgtttaccatctgcctccccacacaataacatcacctccataaaggcaggccatgcttatcatcattgcagtatccaatctgcagtggtgctggctgcctgttgtgggtgctcagtatttatctgtggaaggaa

SEQ ID NO: 2610 - DNA, 261 bp, Homo sapiens
  source 1..261: mol_type = other DNA
ctccacagctccccgtccctcacagcagaagccagagccgctgcagtgcccagctggtcttcatcacgtctatgagctctgcaatcgctctgcagtcgcctcaactcctggtctcctctgctccttctcactgcacccgcatctcccatgtttgcactggctgttccctctgcctggaatgctccttgcccagttatcccactgtcttctttgcatctggcacacagtagatgctcaataaatgcctgtggaatgaatgag

SEQ ID NO: 2611 - DNA, 97 bp, Homo sapiens
  source 1..97: mol_type = other DNA
attccctacccttgactggtttagctgtggacatgacccacctctggccggaggagctgagctggtatctgctgggggcttcctgggaaggtttacc

SEQ ID NO: 2612 - DNA, 80 bp, Homo sapiens
  source 1..80: mol_type = other DNA
gaccctggagcagttaatatgcttctccaaccttcagtccctacctgtaagaaatggagacacaataacgtctgtcttac

SEQ ID NO: 2613 - DNA, 103 bp, Homo sapiens
  source 1..103: mol_type = other DNA
ggtcagaacacctacctcccctggttattgtgaggctggcgattacataagtataagcaggtccgcccagggcttggctactgtaggtgtccaataaacagta

SEQ ID NO: 2614 - DNA, 46 bp, Homo sapiens
  source 1..46: mol_type = other DNA
agcctgggtgacagagcgagactccgtctcaaaaaaaaaaaaaaaa

SEQ ID NO: 2615 - DNA, 446 bp, Homo sapiens
  source 1..446: mol_type = other DNA
tatttatgcctgattcatggctgaaatttcaggatgaaagctatgaaatctctatttgtgtttgtgtatctattaatgtatgttatgtatatgtgatattttcttaactccagagagcattacaaaattcatttatgaaatcctctaaaagtgctctattctaacttggcttggaaaaaaataagcatttataaataaatattcaccaaactcctagaaatataggaactgatcaaatgtttcttaagttaacatgatttggataaaacttagttaaataagattaatatagtatttttggtgtaataaaacaactatatcttcaaaattatcattattgaatataaaacaagcataaattcctattctgcttgagttctagtcaaataagctaatattatacttactagaaacgtaaaatcttaaagcttatagatttgattcta

SEQ ID NO: 2616 - DNA, 215 bp, Homo sapiens
  source 1..215: mol_type = other DNA
ttggcaaactccggccctgagggccaaatctggcccactgcctgtttttgtaaataaagttttattggcacacagccacacccatttggttgcatatcatttatggctgcttttgcgatacaatggcagaattgagtggttgttccagagactgcctggaccacaaacccccaaaaatgtataatttggccttttctggaaacagtttgctaacc

SEQ ID NO: 2617 - DNA, 84 bp, Homo sapiens
  source 1..84: mol_type = other DNA
ggacaggaacctcagcccagggtgctggcctttctccttcgcaggagtcccccaaaatccacacagcgactcgagcagccttcc

SEQ ID NO: 2618 - DNA, 67 bp, Homo sapiens
  source 1..67: mol_type = other DNA
cttgtctgtgaagtgggcgtgaagatcgttgccaccttccaacctacctcacaggggtgttgtgggg

SEQ ID NO: 2619 - DNA, 297 bp, Homo sapiens
  source 1..297: mol_type = other DNA
gccaggcacggtgtctcgtgcctgtaatcccagccatttgtgaggccgagacaggcaggtcacttgaggtcagcagttcgagaccagccgggccaacatggtggaacccccatctctacaaaaaaatacaaaaattagccgagcatggtggtgcacgtctgtagtcccagctactctagaggctgacgcagaagaatcacttgagccaaggaggcagaggctgcaaataagccgagattgcgccactgcactccagcctgggcaacagagcaagactccatctcaaaacaaaaataa

SEQ ID NO: 2620 - DNA, 538 bp, Homo sapiens
  source 1..538: mol_type = other DNA
ggcaaatttcccagatgcttctgagttatctgtttcctggtattcataccttctgcagtctctcacattgtatcaggattggtgtgttgtgagaccaacacaataggaaataagtgaaagcttagcagtcctcctgaggataggtcataaaagccattttggcctctgtattggtcctctcttggatcactaaccttggcgagaacttattgccaaattgtcaaggagctgggccttgtaaagaggcctacatggtaatgactgaaggtcccctgacaacaaccaacatcaactttccaggcatgtgaataagtcatcttggaagtggactgttcatcagtaaagatgttagatgactatagctttggctgacatcttgattgtaagtaaaggcatgagagatcctgcagtgtaactacagagataagctgttcttgaattcctgatctgtagaaattgttagagaataaacatttcgtgtttgaagccacaaaatttgcggggatcatttgttatgctgcaacaaataacttatata

SEQ ID NO: 2621 - DNA, 308 bp, Homo sapiens
  source 1..308: mol_type = other DNA
ggccgggcgcggtggctcacacctgtaatcccagtactctgggaggccgaggcgggcggatcaggaggtcagtagatagagaccaccctggccaacatggcgaaaccccgtctctaccaaaatacaaaaattagccgggcgtggtggcgcatgtttataatcccagctactcgggaggctgaggcaggagaatcgcttcaacccgggaggcggaggttgcaacaagctaagatcgcgccattgcattccagcctgggcaacagagcaagattccgtttctgggagggaaaatggaaaaaaaaaaaaaa

SEQ ID NO: 2622 - DNA, 203 bp, Homo sapiens
  source 1..203: mol_type = other DNA
gttctcagtcgggcgacgatttggctgtctaggcgtcatttggcaatgtctagagacatttttggtagttagaatggggggaagatactcctgacttgtaataagaagacatcagagatgctgctaagtcggctccagcacacaggagccccccacaacgaagagttagtgcccccaaacgtcactgttgctgaggttgaaaa

SEQ ID NO: 2623 - DNA, 3015 bp, Homo sapiens
  source 1..3015: mol_type = other DNA
aaggaaaaagaaactaagcccaaagtcagtacaaggaaggaaataataataaagatcgcagcagaaataaatgagagactaggaagacaatagaaaagatcgatgaaactgaatgttggttgtatgaaaagataaaccaacaaaaacctttagccagactacttaagattaaaatagacaagactgaagtaaaactagaaatgaaagagaaggcattacaactgataaccacagaaatataaaggatcatgagaccataatgaaaaattatatgccaaaaaattggataacctagaagaaatgaataaattcctagaaatatataacctgctaagactgaatcataaatagaaaacctgacaagatcaataatgagtaaggagattaaatcagtgaggaaaaatcttccatcaaagaaaagcccaggacttggtggcttcaccgttgaattctaccaaacatttaaagaatccttctcaaactcttccaaaaaaatggaaaaggagcccaaccaaactcctcattaaactcattttatgaggtcagcattacactgataccaaagccagacaaacactgtaagagcaaaaaactacaagccaatatccctactgaaaatagatgcaaaactcctcaataaaatactagcaaaccaaattcaacagtaccttaaaaggaccatacaccatgatcaagtgagatttatcccagaaattcaaggatagttcaagatacgcaaaatcaatgtgatacatcacatcaacagaatgaaggataaaaactatatcatcattagaatagatgaagaaaaagcacttggtaaaattcagcattcttctgtgataaaaaccctcaacgaattagttacagaaggaaagtacttcaacaccagtaaaggccataggtgacaaaaccacagcttacagccaattataaaaaattgaaagcttttcctctaagattgggaacaaggcaaagatgcccatcctcaccacttctattcaacatacaactgaagttctagccagaacaattacgcaagaaaacaaaaggcgtctacgttggaaaagaagtaaaattatgtttgtagatgacatgatattgtatctagaaaaccctaaagacaccatgaaaaaatgttaaaactaacatgtaaattcagtaatgcagggtaaaaaaaaatcaacatacaaaaattaaatgtatttctaacaaactatctaaaaaaaactatgaaaataatttcacttataataatatcaaaaagagtaaaatactgacaataaatttaaccaaggagatgatctcaacactgaaaattctaaaacactggtgaaagtagaagacacaaacaaatgggaagccacccagtgttcatggattggaagaatcaatattgtcaaatgtcacactatgaaaggtgatctacaaattaatgcaattcctatgaaattccaatgatattttttacagaaatagaaaaaacaatcctaaaattcatatggaaacacaaaaactccaaatagctaaagcaatcttgaacaatactggaggcatcacacttccttatttcaaatatattacaaaggtactgtaatgaaaatagtatggtactggcataaaaacggagacaaatgtaacagaataggaagcccagaaataaaccctggcatgtatggtcaactaatcttggacaaagatgccaagaataagcaatggggagaggacagtctcttcggcaaatggtgtaaggaaaactagatatccacatgtgaaaaagtgaaattagatccttaaactacaaacaaaaatcaactcaaaatggattaaagacttaaatgtaagacctgagatcataaaacttctagaacaggggaaaagctctttgatattaattttgacaaattttttttttaaagagttgacaccaaaagcacaggcaagaaaggcaaaaataagtgaaactacatcaaactaaaaagtttctgcacagcaaaggaaataatgaacaaaatgaaaaagcaaccttatggaatgggagaaagaatctgcacaatatttaaaatatttacgaaatacatacagttcgatagaaaaaaatggaataaaaaatgggtaaaggatctaaatagacagttttccaaagaagaaataaaaatggccagtaggtatatgaaaaagtgcccaacatcacattattagggacgtaccaatcaaaaccatagttggctgctacctcacacttgttataatagatattatcaaaaagtcaaaggataacaagtgttggatgtggagaaagggaacccttatacatcgttgttagaagtgaaaattggtacagccattatggaaagcagtagtggaggtgcctcaaaatattaaaaatagaactaccatatgatctagcaatcctgctactgggtatataaccaaaggaagtgaaatcaatatcttaaagaggtatctgtgacctcatattcattgcagcattatttataatagctgctatatggaaacaacgtgtttgtcgattgctgaatgcgtaaagaaaatgtcatatatatacacacagtgggttattcagtcttaaaaaagaaggaaacctggagaacatcatgctaagtaaaataaggcggacatagacaaataccgcatgacctcacttacatggaatctagaaaagtcaaactcctagaagcattagaaaggtgattaccaaggggcaagggaaatggggagatgttggtcaatgggtatgtatttgctgttataagatggctgagttttggagacctgatgtatggcttggtgactatagttaatgatgtactgtatatttgaaattttccaagagagtgcatcttacaaaagtaagtgaggggatggatatgttaattagcttgactgtgatgatcatttcagaatggacaggtagatcaaaacattatgttgtacaccttaaacatatataatttttattatttgtcaattatacctcaagaaagctggaaa

SEQ ID NO: 2624 - DNA, 280 bp, Homo sapiens
  source 1..280: mol_type = other DNA
cctgtaatcccagcattttgagaggctgaggtgggtggatcacttgaggtcaggagtttgagaccaccctggccaacatggtgaaaccttgtctctactgaaaatacaaaaaatttagccaggtgtggtgggcacctgtaatcccagctacttgggaggctgaggcaagtgaatcacttgaacccaggaagcagaggttgcagtgagcagagatcatgccactgcactccagcctgggcgatggagtgagactccatctcaaaaaaaaaaaaaaaagaaa

SEQ ID NO: 2625 - DNA, 707 bp, Homo sapiens
  source 1..707: mol_type = other DNA
taaagataagaactgtgaataaaaactgaattctggttagttgatttttaaaaagagtggtatgagttatcaattctgagagtagcttatattttaatctaggattgagcacgtgctatttttgcaagtgatgaaagatagctacagacaagggaatttggaaagcaagaaataacccagcagtgctgcagtggaattaaaagtgttggcttgtggtcatgtttttaatatagaaatagagttattaatgtgtggatacgtatatataattttgtatgtctttgccatatcctccatagagaagacctaaaagccagggcactattacctaggaacacctccctacacagagactgcagcttctaaatagtattctccattaaaataaattacatttttctgagtctagggctggagacaaatgtaccatgaacaaactgttgcccagaaaataattatatacccatgaaataaggagaatacatttttaaagattcagaagatagcttgatggggatcctacttattgaatctggaaaaatatgtgcatcaaatttacagtagctaactacaccccatagattaagaatttatgatacatgctcctacaagtaaatgggtaaataaatgaataaggataactcttccttacaaaattccagttaagaaatgtagaagaaactatggaattagaaaatcactttttg

SEQ ID NO: 2626 - DNA, 6497 bp, Homo sapiens
  source 1..6497: mol_type = other DNA
ctcccccatataatcctgtccccagggaatcaacaacccatgctcttcctagtcacctccttgaacatgtccctcccccaggaaacctccaacatgagatagaacaatgtagaaaggacattcaaaacttccctttcccttgtttgtcaaaggaatccgccccaacggttgtccccttaagggaagtcccactggggggagggggcattggttgcattaatgccctcttaaccagctcagaagtcagaaacttcaaaagggaactcaaaccattgttagatgacccttattgggtagcagatcaaattgatcaatttttagggccacagttgtatacttgggctgaactaatgtccattttagatattcttttctcaggggaggaaaggactgtgatccacagggccactgtgatagtcagggaacgtgaacatcctcctggccaaaacgttctgcagcggaccaaaaatttctgttccaagaccctcaatgggacaatcacaatgcagctcaccaagaaaatatgagggatctcggggaaatgataattaaaggaattcgggaaccagtaccctgaactcaaaatatttcccgagcattcaacatacaacaaagaaaggaagaagagctcatggaatttttaaacagactctaagagcaagttagaaaatacgcaggcttagaaataagaagatccacttcggcaaggattgttaaaactccactttgtcaccaacatttggccagaaattacaaaaaaattgtcaaaaaaatagagaattggaaagatagctccatagaagaacttctaaaggaggcccaaaaggtatatatgagaaaagacaaggaaagcagaaacaaaaagcaaaaattccactgcccacccttcaacaagggacacaaggaaataggtcccataaatgttctaagccactagctgcaaagtcacatacaggaaagaaaagggataaaacctggggacctaacggcaagaagggaaaagggggaaaataaatgtttcagatgtgggaaactgggacactttaagacagaatgtcccgaatgagaaagagagagaaatcctcccactcatgacttttgaagaagaatagggggttcagaggctctgtctcttttatctcaaatcccaccaatagcccttgataaatctacaggtgggacccaagctagaaattttcactttcctaatagattcaggagtagctcgctcctctgtttgctacctttcatcaaatgtagcctgctctgcagaggagctgttcgtcacggtggtaaagggggaaaggtttagaacaaaaattttggaggaaacagaagttaaattcaagaatagatcagccgccattaaattcatgttaatccctgatgcagggacaaattcgttaggaagggacttaatgtttaaattggggataggtctatatgttaatcagggaaaattatttacttccttaaacttgcttaccgcccctaaagaaagccaaatccaccctgatgtgtggttaaaggagggaaatcaaggaagattcaagttccgccaattcatataaaacgaaaacctcctggggaaatagtaaaaagaaaacaacaccccattcccctagaaggcagaatgggtttaaaacctataatcaaaggtctcatccatgacagactccttgaaccctgtatgcctccttataacactctaatgttgcctgtaaaaaagtcacatggatcacggctagtgcaagatatctgggctattaaccaaatagtccagactactcaccctgtggtccccaacccttataccattatcagcaaaatcccatatgaccaccaatggttcatggtaatagacctaaaagatgccttttgggcttgccccttagcagaggacagccaggacatgtttgctttcaaatgggaggaccctcactccagttggaagcaacagtactgatggacagtcctgccccaagagtttgtggactccccaaatctatttggtcaaattctagaacaagtcctagagaattttcccctcccctcatccatatatccgctccaatatgtggatgacctgctaatttcaggaggcaccaagggctgggtaacagcagtatcaattaactttctaaattttctgagggaacgcggattgctggtctcaaggagtaaactcgtttgtggaacctgagataaaatacctaggatacttaataagcaaaggcaaacagagattaggccccaaacgaactgaaggaatcatagccgtacctttgcctgaaacaaaataagggcttaggaaattctgggggttgactggatattgtcgcttatggattgactttatgctttaaaaacaaagcctctatgcctgaaacttactcaagagagacctgatcctcttctttggacaccacgggaggtccaacaagtagaggaattaaaacacctgctcataactgccttagttctaccttccctagaacagccattccacctcttcgtcaatgtgaataaagggatagctctaggggtgctcacccaaacacacgggggccaccggcagcctatagcctttctgtcaaaaattcttgacccactaacccacaggtggcccgagtgtatttaatctgttgcagcaactgccctatttacagaggaaagcaggaagataacctttgggggaaacctcactgtaaacacaacccatcaggttagaaccatcctaaaccaaaaagcaggcagatggcttaccgattcaagaatcttaaaatatgaagctatcttactagaaaaagatgatttaaccctaaccacagaaaaaacactcaaccctgccgctttcctaatgggaaatccaatccccaggaccctgaacataaatgtctggatctaatctgttatcaaactaaagtcaggcttgatctaagcgagaccccattcaaaacggggcaacacctgtttatagatggctcctcccaggtatttgaagagaaaagacacaatgggtactcggtagtcaatggggaagccctcacagaggtaaagtcaggaagactgcccaataactggtccacccaaacatgtgaattgttcacattaaatcaagccataactgggaaagggactatttacactgactccaaatatgccttcggggtagtccatacttttggaaagatctggactgaataaaaggccaggaccttgtccacaaggagttaatcactcaggtattggaaaatctccagctaccagaagagatagccatcctgcgtgtcccaggacaccagagaaatatttctttcaaaagccaaggaaataaacttgcagaccaaatagccaaacaagctgcctcttctcccaaaatgcccatttttcacctaaccccttgtctttcttccccaactgcaattcacatcttctctcccactgaaaaagagaaattaaggaaaataggagctaaagaaaactcagaagggaaatggatgttaccagaccaaagagaaatgctatcaaaacccctaatgagggaagtcctatctcaactgcatcaagggactcattggggacctcaagctgtgtgcgatgcagttctcagagtttatgggtgtataggagtttataccctagcaaaataagttacagatagttgcctaatatgtaagaaaactaatttaaaaaaaccctaaggaaaccaccttttgggggaaaaagcccaggattgagaccattccaaagtgtccaaattgactacaccaaaatgcccccaataggccacctaaagtacttgctagtaatagtggaccaccttactcactgggtggaggctattcccttttcaagtgcaactgctaataatgtgattaaggcattagtagaaaatattatacccaggtttggactgatagaaaacattgattcagacaatgggacccacttcactgcacatgtcattaagggactagcctaagtactaggaataaaatgggaatatcatactccttgcacccaccctcataaggaaaagtagaaaggatgaaccagactctaaaaagccacctaaccaaatcaattttagaaactcagttactatggactaagtgccttctcactgccttattaagtgtctgaactgcccctcagagagatgttggcctatctccctatgaaatcctatatgggttgccttatctacactctactactgacattcactgaaacaaagtttgtttcatttgaaacaaaggatcagttcctcaaaaattatatactcgatctgtcttccactttctcttccctcaggatgaaaggcttcctagcacaaacaccacccctggagttcccggtacatcaataccagcctggggatcacgttctcatcaagagttggaagagggaaagcttgaaccagcttaggaggacctcatctggtactcttgatgaatgaaacagcaatctgaatggctgaaaaaggatggacccagcactccaggtaaaaaggaccccacccttacagagtcatgggctgtcactccaagaccaatgccttccaagttagtattcaaaagggtctaatctgtctttcccttcttcccttaactactcaaggacacttcattatcaatgtaaccagatcactctctcctcaaacaatcacgtttgacgcatgtcttgccatacactttggggacctccaaaaccagaagcagctatcctccttgtagaaatatctctgtccttccagggtagattctaacctcttacattcacgcaactcttgcttggtagaagccgaaacccttacgttttgggaaaggttctgctccacctggaacaatgtcctatggactactaagcatcaagggtggacctccccaggaagctgcgcctctttaaaaccatatcttcgtttcaccaaaggaaatgccccctctaattgccaacatcatcaatgcaacccagtgcaaatttctatcttacccctacctccatcgatcttgagcccactttaggtcttttctatggcataggaaccgaagtgggctgagacagatcccatagggtcctttgaaatgcgctttagcaacccttccccacctcctaggggtaacccctctccaaaccctcctccaaatcaaacaactattttgccactacctaatgacaaaactaaagtggtcatagtggaagtcaaagacttaaaccctagccattgaaaccgggtatcaggatgcaaatgcctagctggaatggattaaatattccgttcatactctaaacaaaagtgactgttacgcttgtgcaacaggtaggccagaaacaaaaatagttccttttctgcttggatggtctaaccaaccgggtatggactgcatggtagctctttccagcatcccacagcctggggtaataagtcatgcggcactctcttactgcttttcccagaagtgaaagaccgccctgtgtgtcagcccccaagggccatccagctcccagcgtctgatgccaatttttcctcatgtctctcacaacagggagaaaacttggcattctttgggaatctaacaggatgcagtgaacccaagccttttgaagagctcaccaatcagactgcccttgtctatccatgagcagatgtttgatagtattgcggaggccctctagtgggtatgctgccaagcaactggagtggcacttgggctctaatccagttgtctatccctttcaccctggcatttcatcagccaaacaaaaaccaactaactcagaaaaaaaggaaagcccctcaagggtcctttgaccccgatatctacatagatgctatcggggtcccctgaggggtaccaaacgaattcaaagctcgaaatcaaatagctgctggattcaagtctgtccttttcttgtggtctactataaataaaaatgtagactggataaattacatatactataaccaacaacgatttgtcagttacaccagggatgccattaaaggaatagctgaacaattgggtttcaccagccaaatggcctgggaaaatagaatagctcttgacatgatattagtggaagtccaatgttgtacctgtatccccaataatacagcccctgatgtaactatcactaagggtctataaggcctcaccactctaggaaatgaactagctgaaaattcgggaatgaatgatccctttacaggtgtaatggaaaaaatggtttggtagatggaaaggactaatggcctctattctcacctcccttgtgatcataataggggtgctcattctcttagggtgctgtattataccctgtgtctgcggactagttcaaaagctcatagaaacagcccttaccaagacctcccacaactctcccccaccctattcagataaacgtttatttctaagcaaccaagaagagcagtgaagccagatcctgttagaaatatatgaagaggaaggactacaaaatcaaaaggggaa

SEQ ID NO: 2627 - DNA, 1058 bp, Homo sapiens
  source 1..1058: mol_type = other DNA
gttgcaggaagtcagggaccccaaacggggggactggctgaagccatggcagaaaaacatggattgtgaaggtttcatggacatttattagttccccaaattaatacttttataatttcttatgcctgtctttactgcaatctctaaacataaattgtaaagatttcatggacacttatcacttccccagtcaatacccttgtgatttcctatgcctgtctttactttaatctctcaatcctgtcagctgaggaggatgtatattacctcaggaccctgtaataattgcattaactgcacaaattatacagcatgtgtgtttgagcaatatgaaatctgggcaccttgaaaaaagaacaggataacagcaatgtttaggaaacaagagagataaccttaaattctgaccgccggtgagccaggtggaacaaagccacatttctcttctttcacaagcaaatgggagaaatatcactgaattctttttctcagcaaggaacatccttgagaaagagaatgcacacctgggagtgggtctctgaactggcccccctgggtgtagccatctcttatggtcgagactgcaggggtgaaatagaccccagtctcccatagcactcccaggcttattaggaagaggaaattcccacctaataaattttagtcagaccagttgatctcaaaaccgtctcctgataagatgttatcaatgacaatggtgcccaaaacttcattagcaattttaatttcaccttggtcctgtgatctcgccctgcctccacttgccttgtgatattctattaccttgtaaagtacttgatgtctgtgacccacacctatttgcacactccctccccttttgaaaatccctaataaaaacttgctggtttttgcggcttgtggggcatcacggaacctaccgacatgtgatgtctgccccggacacccagctttaaaatttctctcttttgtactctgtccctttatttctcaagttggctgacacttagggaaaatagaaaagaacctatgtgaatatcggggctggttccctgaca

SEQ ID NO: 2628 - DNA, 467 bp, Homo sapiens
  source 1..467: mol_type = other DNA
tatattaatcatgcttttttataatgtataatgttttcacatcttggggacctcactgactggggagagactgcccttcccagggcaggccaattcttagagatagcaaaggggtcccttgggagtgcacctttgcacactaaccaactcagagtccatctcctcgatttgactcttccactgcagaaggcagtatcccctcaccctgatcacccagggccaggcaccaggcagctggagaccacccctgtagctactgcccaagacattcaaacctgccaatcctacactctgcccccgcccatcttcgcctttgccatggagacacagtggaaagctgctcgcctagttctgcctcctgaccactctggtgcgtcctcctcctgtggccctgcgtggcctggtgcgctccttttctccagaaatgcaagtaacaaacttttctttcaatgacagcagcctctcct

SEQ ID NO: 2629 - DNA, 2359 bp, Homo sapiens
  source 1..2359: mol_type = other DNA
atactgaaacatttaaccaaaacataaaagggtgcctattggcttttgtgtctccataacttaggttctaaattaattgtaacatttgctaaaatgtacccattgacaaagcttcatagtcttaacactggggctcaaattacagttatacctggagatcccactaaatctaaacattgtacccctataatctttttaaaaaggcaactaaatataaaatggggggtggatgggtaaggtatgcttcactttaactgtagcctgtctaaatttcctgtggtcatagtacccaacgccctaatatcccatattgaacacagacactctaataaaacaaataataaattaaaattaaagtcagtctttggcagttataaactagcttgataaaatgatgccccatggacctccagttaaaacagttaatatgaggtattcaaggattaaaacttactaattaataaaggggtgattatacccttgtttctccattgaacagcccaatctttcctatccttaaacctggaaaaaaacaagtgtgcctcatggtggattactacaaccttattgctgcagtcccatccattacccaatttccattattattaaaattattaattctacacaataaataactggccaatattttgctcttacagatttggctaacatgtcccattaagtgtctacttgcacagcttcttggctgccgtttgccttctgccctgaggggcacatacacctttgcaggccacccacagggagctccacggctttgccatggcacacaatgtctgcagacagggtcttcaccacatccgccttctccaggagcacaaatgaggaaactcattgtcacactcattaaggacatacaagtccaacatctttagatactttcgaggttctgatggcaatgtagtcctcatttacaaattttacttaatcttcttgctgctgcttacaaatcagcttgctttaaatggggcaccctccataaacaacctctataatcaaaccttaaaatccatgggcactcctgttggtgccctcagagaccccttcattatagaagctctggcaagctctatgcagccctggagtctctggcccacttaggatggacataaggtgcctaagggctttggatgcaagaaactatccctctcagcctcatgctaccctattaaagcagtaaatggctggatgcctactgggctctcctggacacagaggctctcaaagacctaagcctaggaccccaatctccaactgtccattataaacacctgacaagctcagcaaaactaccgatgcctccttaacacaggacagagtcaagcctgggccctctggtgtattctacccacaggagggtggtctcccatgtcctcagtcccttgtgaggtcatcctcccgcagaccccttggtgtcccttagattaactgagtgaacagcagtgggagttcacagagggtacagatggcattgccaaccctcatataaatgatggagcccaagagaatgttgctgcttcccatcttttagccagcatgccctgatacgaaacggaacccaaaaaacaacgcatgtggccaaagttaggcagtcgtcttaacgctggatgccctggtcagcacagcgccccagcttcacatttatggccaactgttggaccactgcccaagagttgcccccttcaggatgaaaaactctgggactcttcctcacagataccccaaatccaaatctaaatcacatctctccacaggtgctacagctgggattccaggtcttgccaggacactccttcatctcttcagagtggcaggcatcactggaagtcactgagacacacatgccacttctcggaatccacaatgctgggctctgggaaaaggcattcgctacaacttccacagccctgataggttccacacaatcggtttcacgaagacacacaatggtctcctcaaacaactccatttcaaattctggtctgcaaacagaccccgaaatgggcctctatcttgcaccacaaacctgaatctctcttaatttagggcctttcggttgactcacacctcacacaaactttaaaaaacattaccatagtcccctttaaacataaaaagagggctatgtcttgcattcttgtatataaaagctcattacatattggggccttccataatgtttccccctattcctataaatcttgcatcttatccccaccccatcagggctggagcccagagagagaacacattctctcctggacccactaaccccagggctcccacaggccgtgcagctgctcatccgatacgggacccacttgagcctaaacttccacca

SEQ ID NO: 2630 - DNA, 2036 bp, Homo sapiens
  source 1..2036: mol_type = other DNA
tttaaaataactagtacgtatgttgaaagaggtaaataaatgtatgaaaatataaagcattcagaagacaattgtccataaaaaagaaccaagtgggtatcctggaaattcaaaatacaatgtctgaagttgagaattagatttgttacaaaccagatggcacacatcagaaatctgaatgagaaaactcagaagcaagttaacagaaaatatccaaactgaatcacagaagaagactaaaagagagcatgggagttatgtgagacacagacaaaagttccaacatcgatgaaattggaatcctggaagaagagagaggggaagggcaagagaaatatttaaagaaaaaagtaattgagaattttccaaatctgatgagaaactttaaatcactgaatcaaaaagttcactaagcccaacagggtggacacaagtgcacacacaaacatacacacaaaacccatccaagtacattatagtcaagttcctgaaaatcaaagataaagagaatttaaatgcatttagagaagacaggacatatttccttcgaaggaatcatagaagactgacagttgacttttagacaaaattattgaagctagaagctaatggaataatgtctttaaagtgctgaaagaaaaaaaaaacctagctggaattctttacctgaaaatatttttcacaaaatcaaggtgctttaaaccaaagaaataactcaagctaaaggattttattaccatcagaattgcatttcatgatatactgagggaaagtcttcaggctaaaggaaacgtatccatatggaagcgtgaaactaatgcacagagtaaagagtgctagaaggtgtaacaatatgagacaatattgactatttcaaataacaataataatgtcttgtggtatttgtaacatacataaaagtgaaagatatggcaacaggacaaagccagaatgggtaaatacagttaaattgttgtatggtttgtacactgttttggaggtagtaacagtaccaatttaaagtagactgctaaatcaggtttgcatattctgttgtcttgggtaaccaccaataggaaggtaaaattaaaaaaaagctatagtggaatagtaaagtaatactggattaatccaaaagaaaatgggagggaagaatagagaaggagagaataagtgggacaactagaaaagaaatagaaaaatggggatttaatttacattaaatgtgaagacctaaatttcccatttaaaaactaaatgttggcagattggattaagtgaagtatagctacatgctgtttacacacgaggtaaactttaggtgtaagaacacaaaaaaaggttaaaattagtaggatggcaacaaagactgacaaacaaaagcctgatatggcaaagtgactatcagataaagtattctttaaggcaaggaatatcagaagaaataaagacatttatgatgaatgggccagttcaacagaaaaaaaatgtgtaataatatgcctaaatttttatgcacctaacaacaagtgtacacacacacatatggagagaacaaaaggagacaaaagcaaaaggggaaataattggagatgttgaacaaaacttttagtaactgataaagtaaggattgcaaaataagtaaggatatagatacaacatacttcagcacttagatttaattaatatgtgtcactacatacaactactgcaaaaacatagccatttaggctcccatgaccataggcagagcgttggagttggcctgtggttgtgtttgccaactcctggattaggccatgaaagaagtcgtaataaatattaaaagattgaaaccagactgtatatgttctttaaacactgtggacttaaactaaaattaaatagcacataaatagaatatcttcagatattttgaaattaagcaatatatttttatataatgatgggtaaaatgaatcacaacataaagtagaaaattttctaattatctaataattattagaattattagaatttctaataattattagaaa

SEQ ID NO: 2631 - DNA, 65 bp, Homo sapiens
  source 1..65: mol_type = other DNA
tctagattgtggatcttcagataaattctaccattttcatttcactttctgaaagtcagggtcgg

SEQ ID NO: 2632 - DNA, 443 bp, Homo sapiens
  source 1..443: mol_type = other DNA
taatagagttattcataattttaaaaatgaaatgcacaaatgccaatcaggggtagaatgaacaaactgtagtatagtcaaacaatggaatactctctacagcaacaaaaaagattacagctacctgcaacacagtctcacaagcataatgttgagtcaagccaaaaaagggcaccaaaaagtgtaccatccttgatcctgtctgcataaagtaccacaccgagcagcggccatctctggggatggaagtggagatggaggcgccttagtgtggtcaggactgggaggagccaagaggggtttcctgggtgctaatgatgttctctttctccatctggaggctgacttcacaagtgcatacactttgagaaaaggcatcgagctgtgctcttatgatgtgtgcatttttctgtagtgtaataatttagtttaaaaaaatgtct

SEQ ID NO: 2633 - DNA, 2220 bp, Homo sapiens
  source 1..2220: mol_type = other DNA
gggggatataatagcctgggactctcagggaaaaacaaaggaggtactacagaccccatttggcaaataacctctgttttcctcatgaaaacccaggaattaaaaacagatacattcctctcaaaaatctaagactctgttccattttgcattgcattatctaatgatttttacttttgggggtatcagaaatcacttcacattttgagagagctttggtgtgtaataactagataggaaataagagcattggggataactaatggcagttatggggggtttcttggctttttgaatatttggatcagagaagcatggtcttggccacctagaaggtatgaagatgaccccatccaccaccctcccgccatcccccactgagagataagactcccataggggatgggctgataacagaatgggctaattggctttgagttgcttggcaataaaatgcaccataaaatcattgtactgtcttgttctatagtatttcttttttggggagaatccaggatctgttataaaataattagacccttaattttggggggatctgtattgccttctatctgtgtctgcttactatgctctagaacctgcatgctttcctgaccctgttcctgcaagatctccaccctgaagccagtaatccaattaagaagttggcaaatgaaaaatcttacaactgccggatcttcttctgtgtttgtatatgttttgtgtgtgatgtctacatatgaatgtgtttgtaattggtttaaaaataataagagtttaaatcaaatattttgtcagaaaaattaaaactgtaatgccttttagttcatgtaacttaagtaatatttgggaaaataaagacaattttaaagattattgggttttgaaaaaaaagaaactgtctttatttcctcaaagattactttatttccaaacatcttgttaaaacaggttccatgggtataagtaagttggctaagatttgaaggggtttatttagtttttttttccccataggtcaaaatatcttcaaaaacttggacatttggtctaaattatgcagctcagatattaggttgcaaaaggctttaaggtcataaactgcttttttgacttttgaaaattgttcaatttacctactttggagcattagattctaattaggtcctggagatatgtggagttagccgtgccccctagctatgctggaaaaagtcagacctcatctgcagttctgtctgatgtcctaggccccaaacctaatacataataaaaattgcttatttatcaggtttttcaccaagaataatagtttctaagagttaacattgtaacatgtaattgggactactgggtaaaaagttttacatacaagtttgcaaagtatggaaggaaaatagaatgacgttttggtgggaggttataaaaaagcatgggaatacagattttgttaaagggaatgtaattttgtctagttcagagggctttaaagattgccttaacctaaaagaaggggacaaaactgagtgtttaaagtaagttgaaaaggatttgtgaagggttgatcttgtaaaaaaggttctgtggctataagcaaattggctaagatttgaaggggattatttaggtttgttttccccgtaggttaaaaccttaaaataaaagcatactgatttggagccagaatctgaacccatgtggccaaataacaaggttttcttagacaattgatctgtttaacaaaaattataaagagttataagagctttatgaaaatcataacttacggtcaaactttttaaaactggttacatttatacaatattattacaaactagctttatcattaaagatgcactaatgcaaacataaaatttggttttctcttttgaaaaggctttcatgtaatattaaaagataatgaaaggtttttggctgtgtctttaggtaaatgacaaggaaaaagggaggggagagagaagagacagattcagctggcatcatgctgtctttattgtgtcttgtttagaaagctgattctctcctctctcagtgagtatagagtcgtgcttttgaaaaatatctgagttgtcattttggctaaatgagtgacttttggtgacttgaaattctatttttctatcaaatgtcttaaacctttgagagttgacaaactgcaaaatcaaattataaagtatatctttttctggcctcatacct

SEQ ID NO: 2634 - DNA, 493 bp, Homo sapiens
  source 1..493: mol_type = other DNA
tgtccttgggagtttaaccttataaccacatagtggtactttctcttggtctctgccatccagaggacaggagtttgggggttcatgtcatagccctaaaaattatcttgagcagttaaaagcttttgcaagctcaaaattgactgctctaggctccttctgggaagggcaatagagactgcccagtgctgtagcttagtagctaagcctctgccattttacaatggcagcctgggttcattcctggcttaaggaatgagtcctttctcatttcatatctgtgacctttaccatttattgattctcttcccctccatgagccaccttgaatattcctttctctgagctcctggaaggttacctttagcaaagtccaaaagccagaaatattggcagtttagcatggctaaagtggagcaatgagaaactttaaaagatattttttcttgacagggcactatggttaatagttagctcaattaaaagcagatat

SEQ ID NO: 2635 - DNA, 681 bp, Homo sapiens
  source 1..681: mol_type = other DNA
tctttctggagaccatgaagggacgatactgaggagaccctcaactccaaggaaatagactgcagcaccaattggaagactttgagtaagtggggtgcatttacccaggtagtggatgggattgggttagaggcccaatttaggggaattaaagtctctcctaagtcagagagggttaaaggcccctcttaataaaaggcgaggacacttgaccaaacttgagttcgagtgccaacttaggaaggttagagtccttcctaagatttagtgggttagaagtccctctcaataaagtccctcttggctaagaacaggttcagtactatgggatgttaatggctattctctttgtattaatttgccttgaactctttgctgatgcctgtgggtgacaggattaggcaagtacagaattataggacttggggagcttttttctccccaaaaggggaaactcaagagctgataagacagctggaaaagatcccttcacaactgataagtggttgcctaaacttttcagtgttgctgcaatggatgggtctttctctggcctccctgaactcttctccttccccagcctgctgcagggaatgcttttctctctctctttctctcctttccctttcctatcttttctgttactcagggtgaccatcttgccagggaccacatgttgaa

SEQ ID NO: 2636 - DNA, 628 bp, Homo sapiens
  source 1..628: mol_type = other DNA
tgtcagagccttttgaaccagagcaactccatcttgaataagggctaggtaaaataaggctgagacctactgggctgctttcccaggaagttgggcattctaaatcacaggatgagataggcaatccgcacaagatacaggttataaagaccttgctgataaaacgggttgcaataaagaagccagccaaaacccaccaaaaccaagatggcaacaaaagtaacctctgatggtcctcactgctcattatatgctaattataatgcattagcatgctaaaagacactctccctagcaccaccacaatcgacaaatgttgcaactttaggaagttaccttgtaaggtctaaaaaggggaggaactcacagttctgggaattgcccacccctttgctggaaaactcatgaataatccaccccttgtttagcatataatcaagaaatacccataaaaatgagcaaccagcagccctcagggctgctttggctagaagtagccattctttattcctttacttttctagtaaacttgctttcactttattccatggactagcctcgaattctttcttgtgtgagatccaaaaaccctctcttggggtctggatcaggacctctttctggtaat

SEQ ID NO: 2637 - DNA, 215 bp, Homo sapiens
  source 1..215: mol_type = other DNA
aatggttcagtggcccaggcttgggagacccagttgggttcagatcctggtcctcccctcgccagctgcatggcctcaatcaagtcacttagttttgacagctcagttccctcgtctgtaaaatggagatggaaatcatagtacctaacttatagagtggttttgagaagttaatacacattaaacactttgaatagtgtctggcacataataag

SEQ ID NO: 2638 - DNA, 217 bp, Homo sapiens
  source 1..217: mol_type = other DNA
aagggttggaaaacaaggcccaatcaggctaggtctgacttgtcgcctgcttttgtaaataaagttttattggctcacagacacacttatttgtttctgtattatctatggctgctttcgcgccacaacatggagcagttgtggaagagaccatatggccgacaaagcctaagatatttactctctggctcttgacgggaaaagtttgccaattcct

SEQ ID NO: 2639 - DNA, 411 bp, Homo sapiens
  source 1..411: mol_type = other DNA
gataaattgtgctatattactgatacaaggatacaagggaagaaaatataacaaagaaaacatactattagtatacccaactacatagacacaaaaataatgttgagagaatgaagacagacaaaagaacacctatccatgtttaatgttcttatcacaataaagatgaaatttaaaaaagaatacctaccatatgattccatttacatgaagttcaaaaaagcaaaacaaatgtatggtgtcagaagtcaggccagtggttacctttgagggaaaggggccttcaggagcattgttcacattctccgtcttgtcctgggaggcagttagaggatgtggtcactccagaataatttattgagtcacatacttctgctatttgcagttttccatatgtggaaccccaataaa

SEQ ID NO: 2640 - DNA, 53 bp, Homo sapiens
  source 1..53: mol_type = other DNA
tataaactgcctcacattcttccttggaatgaggcagaatattaattaattaa

SEQ ID NO: 2641 - DNA, 307 bp, Homo sapiens
  source 1..307: mol_type = other DNA
ccgggcgcggtggctcacgcctgtaatcccagcactttgggaggctgaggcgggcggatcacctgaggtcgggagttcgagaccagcctgaccaatatggtgaaaccccgtctctactaaaaatacaaaaaaattagccttgcgtggtggccggcatctgtagtcccagctacacgggaggttgaggcaggagaattgcttgaacctgggaggcggaggttgcagtgagctgagatcgcgccgctgcactccagcctgggggacagagcgagattccctctcaaaaaaaaaaaaaaaaaaaaaaaaa

SEQ ID NO: 2642 - DNA, 304 bp, Homo sapiens
  source 1..304: mol_type = other DNA
ggctgggcgcagtggctcacgcctgtaatctcagcactttgggaggccgaagcgggtggatcatggggtcaggagatcgagaacatcctggctaacacggtgaaacctcgtctctactaagaatacaaaaaaaaaaattagccgggagtggtggtgggcgcccatagtcccagctactcgggaggctgaggcaggggaatagcgtgaacccaggaagcagagcttgcagtgagccgagatcgtgccactgcactccagcctgggcgacagagcgagactccgtctcaaaaaaaaaaaaaaaaaa

SEQ ID NO: 2643 - DNA, 450 bp, Homo sapiens
  source 1..450: mol_type = other DNA
ctaatgctacaatcctggagtcacctcttgactcatctttcccattgccaccacaatccattctaatatgtcagaaaatctgtcagttttaatctacgaaatctcttaaaatatttccgtctaaccattccttgttttccttctatttctatagccacccttctggttcacaaaccttttacttcttgcctcaactagtgtaatagcttcctaacccatttctctctatttcagacagatggcaaggttattttccttaaaaagactcttattatgttgttccttagctcaaaatccttcaatggctgaactttcactgcctgaaagataaatcccaagattttagccatgcattcaagagcagctataaccataatgactccagccttcacacttccagcttcaccttccaaaccacctccatattccagcaaattagcctacttactg

SEQ ID NO: 2644 - DNA, 315 bp, Homo sapiens
  source 1..315: mol_type = other DNA
caagttgagcatctctaattcaaaaatctgaaatccagaagcttcaaaatctgaatctttttgagcactgacttgaccccacaagtggaaaattccccacccgacacctttgctttctgatggttcagtttaaacagattttgtttcttgcacaaaatttttgtataaattactttcaggctatatgtataaggtggatgtgaaacatgaattatgtaattagagtcgggtcccgttgtgtatatgcagatattccaaacctgaaatccaaaacacttctggtccctagcattttggataagggatactcagctt

SEQ ID NO: 2645 - DNA, 2402 bp, Homo sapiens
  source 1..2402: mol_type = other DNA
agttaagttggtattagtttaaaatagattgttataactttaggatgttatatgtaataccatggtaaccacaaagaaaataactatagaatattttcaaatggaaagtaaaagggaatcaaaatttgtcactatgaaaaatcaaacacaaagaaaatcagtgagggaggaaattaagaacaaaaaaagctataagataagcagcaaatgagtaataaaatggcaaaagtaagtccttctctattagtaatcactttaaatgtaaataaattagactcctcaatcaaaagatacagattggcaggatgcactaaaaaaacacgatttaattatatgttatctataagagactcacggtagacttaggacactcatgggtagaaagtgaaagaacagaaaaaaaatttcatgcaaatagcaactaaaagagaacatgtttagccatattaatatcagacaaaatagacttcaagccccccaaaagttacaagagacaaaggatattgtacaatcataaaacagtcaattcagaatatataacaattataaacatatatgcaccaaacatcagtgctcctaaatatatgaagcaaacactgacagaattgaagggagcaatacatagatctataataatagagaagatttcaatatcctactttcgataaggtatagaacaatgaaacagaagatcaataacactgtagactaattggatctagctgacatttacaaaacactctacccggcaacagcagaatacacatttttctcaagtgcacatgacatattctccaggaaagaccatatgttgagtcacaaagtaagtcttaataaatttaaaaatattgaaatcatacaaaatatcttttttcaatcataatgaaatgaaactagaaatcaaaagcagaaggaaaactggaaaacacataaatatgtggaaattaaacaacatacttaaacaacaatggctcaaagaagaaatctcaagagaaactagaaaatatcttgagaaatgaaatgaaaacacaacataccaaaatttacaagatacagtgaaaacagtcctaagagggaaatttatagctataaatacttaacattaaaaaagaaggaagagctcaagtcaacaacctaactttatgccctaaggaactagaagaacaaaactagcagaaggaagaaataataaagattaggtcagatatagacaaaataaagaatagaaaaacaatagagaaaatcaatgaaagcaagactctgttctttgaaaagatgaacaaaattgacaaacctttagtgagaatgactaaggaacactcaactaaaatcagaaatgaaagaggggatattactattgattttacagaaataaaaaatgtgtaagagagtactataaatagttgtatgccaacaagttggatgacctaaatgaaacaggcacatttctagaaatacacaacctactaaggctgaatcacaaagaaatagaaaatctcaataacaagtaaggagattgaatcagtaatttaaaaaatctcctgataaagaaaagcccagcatcagatggcttcactggagaattctaccaaacctttaaagaagaattaacaccaattttcctcaaacttttccaaaaaatgaagaggaaaaaacactatcaaactcattatgaggtcagaattaccctagtaaaaaagccaacaatactacaagaaaaaaaaaaaaaaactacaggccaatattcctgaatattgatgcaaaatcctcaacaaaatactagcaaagtgaattcaacagcacattaaaaagcttgtacaccatgaccaagtcaaatttattaatgaaattcaaggatggctcaacatccaaaaatcaatcaacataatgtgctacattaacagaattaaggggaaaaacccacattattttctcaattgatgctgagaaagcctaaaatttgacaccctttcatgataaaaacactcaacaaactaggaatagaaagaaactactgcaacataataaaggccatatatgaaaagcccacagctaacatcatactcagtggtgaaacactgaaagcttttcctctaagataaggaacaagacaaggatcctgctcctgccacttttactcaacacaataatggaaatatttttctaaaaaaagaaaagtgtctttgtttgcagacaaaatgatgtagaaatatgtagaatatatgtagaaaaccctaaatactccatgaaaaataccttcagaataaatgactagcaaagttgcagaatacaaaatcaacacgtaaaaatcgtactttatacactaacaatgcacaatttgagaaggaaaccaacaaaacaatttacaatagcatcaaaaaatagtcagaaatttaaaaata

SEQ ID NO: 2646 - DNA, 1210 bp, Homo sapiens
  source 1..1210: mol_type = other DNA
gccagtcaacaatactgtacccagcacagatatccttgagaaatgaaggagaaataaagtctttcctagataagcaaaaactgatggaatttatcatcactagactgaccctacaataaatgcttaagagagtcctacatctggaagcaaaagggctatattcaccatcatgaaaacccaaaagtataaaactcattggtaaagcagacacacaaataagaaagagaatggaaccacatgttatcattacagaaaaccaccaaactgcaaagataaacaaaggaaagaaagaaagaaaggaaggaagaaaggaaggaagaaaaaggattatttaaaattatcagaaaacaattaaaatgacaggaataagacctcacctatcaataacaacttttttaaatggcttaaatttcccagttaaaagatatagactggctgaatggattttaaaagtgacctaactctatgctacctacaagaaactaatttcacctgtggagacacacatagacagaaactgaagggatgaaaaaagatattgcatgcaaaaaaaaaaaaaacccaaaagtgtgcaggagtagcaatacttacagcagacaaaatagattttaagtcataaaacatagagaaaaagaggtaattatataatgataaagggatcatttgagtaagaggataaaacaattataaatatacatatactcaacactggagcacccagatataaaaagaaaatataattagagctaaagagagatagatgcttatacaatcatagtttgggactttaaaactcaattttcagctttggagagatcatctagacagaaaatcaacaaggaaacattagacttatactgcactagagactaaatgaagctaatagacatttacagaacatttcatccagtagctgcagaatcacatgcttccctcttcagtacatgaaacattctctaagatagaccatatgttaggccacaaaacaagcctcaacaaatttttaataattgaaatcatatcaaatatgttctcagaccacaatcgaataaaaccagaaatcgatgacaaaaggaactttgaaaactgtacaaatccatggaaattaaacaacgtgctcctgaatggtcaatgggtgaatgaagaaattaagaaggaggtcaaaaaagttctcaaaacaagtgaaaatagagctgcaacataccaaaac

SEQ ID NO: 2647 - DNA, 316 bp, Homo sapiens
  source 1..316: mol_type = other DNA
gacttccagttctggaacaagatggttaaactcatttttccctgctctgctcctctaaatacaactaagtaccttggaaactattcagcagacaatgataaagggctctgaaagctagaagaaaaggtgtacttgcaagaaacctcaggacttgagtaacagcaacatggtaagttttctaagttttctttttgtctcccatatacgctgggctgtgctggaatcaccaacaggcacagaaaaaatgacaacaaaacaacaacaaaacccccaagaatatcctgttgtctttggccaaagttcaggaaaggggagc

SEQ ID NO: 2648 - DNA, 291 bp, Homo sapiens
  source 1..291: mol_type = other DNA
gcctgtaatcccagcactttgggaggccgaggcgggcggatcacgaggtcaggagatcaagaccatcccggctaaaaagggtgaaatcccgtctctactaaaaatacaaaaaattagccgggcgtagtggcgggcgcctgtagtcccagctacttgggaggctgaggcaggagaatggcgtgaacccgggaggcggagcttgcattgagccgagatcccgccactgcactccagccagggcgacagagcgagactccgtctcaaaaaaaaaaaaaaaaaaaaaaaaaaaaa

SEQ ID NO: 2649 - DNA, 311 bp, Homo sapiens
  source 1..311: mol_type = other DNA
gccgggcgcggtggctcacgcctgtaatcccagcactttgggaggccgaggcgggcggatcacgaggtcaggagatcgagaccatcccggctaaaaaaacggtgaaacccagtctctactaaaaatacaaaaaattagccgggcgtagtggcgggcgcctgtagtcccagctactcgggaggctgaggcaggagaatggcgtgaacccgggaggcggagcttgcagtgagccgagatcccgccactgcactccagcctgggcgacagagcgagactccgtctcaaaaaaaaaaaaaaaaaaaaaaaaagaa

SEQ ID NO: 2650 - DNA, 267 bp, Homo sapiens
  source 1..267: mol_type = other DNA
tcctctgagccaccttaaggaatcccaccctgacccggtcagagctcaccatgcctccctctcctacttgctcagcattttgtgtctatctagactgaagcctttgctttctctctgtgattatggtgaaagttcagtttgctttcctatctctagaatgtcagcacgaaggcagaggcatggtctcctgagttccataaccccaaagcctaactccctgcctgccacactgaggggcttagtagacattgacttactaaattgaat

SEQ ID NO: 2651 - DNA, 446 bp, Homo sapiens
  source 1..446: mol_type = other DNA
atttatgcctgattcatggctgaaatttcaggatgaaagctatgaaatctctatttgtgtttgtgtatctaataatgtatgttatgtatatgtgatattttcttaactccagagagcattgcaaaattcatttatgaaatcctctaaaagtgctctattctaacttggcttggaaaaaaataagcatttataaataaatattcaccaaactcctagaaatataggaactgatcaaatgtttcttaagttaacatgatttggataaaacttagttaaataagattaatatagtatttttggtgtaataaaacaactatatcttcaaaattatcattattgaatataaaacaagcataaattcctattctgcttgagttctagtcaaataagctaatattatacttactagaaacgtaaaatcttaaagcttatagatttgattctaa

SEQ ID NO: 2652 - DNA, 289 bp, Homo sapiens
  source 1..289: mol_type = other DNA
ggccgggcgcggtggctcatgcctgtaatcccagcactttgggaggccgaggcgggcggatcacgaggtgaggagatcgagaccatcctgggcaacatggtgaaaccccgtctctactaaaaatacaaaaattagctgggcgtggtgatgccagccactcgggaggctgaggcaggagaatcgtttgaaccagggagtcagaggttgcagcgagccgagactgcgccactgcactccagcctggcgacagagcgagactccgtctcaggacgaacaaagaaacaaacaa

SEQ ID NO: 2653 - DNA, 2019 bp, Homo sapiens
  source 1..2019: mol_type = other DNA
tcttggccatgttctctttctcattgaagacacaggcatgtggctcacaatctttccccataaggctttgccaccattcgtggtgaatttagagtttatgtgaacagagggcccaggactctggctttatagtttcccaatttcatcatctccagttgtctttcttttcgcttaattcattcacttaatcccatggagctactctggacctcaccattacctgaaaattggctttacctttgaggtcttaaatttaaaacactgtcctggctctgactgtaaacttttgagatctgtagttccttgacatctctaaatggttcctttactagcaggcaggaacccattttccatcactttaaacttcttgccagaatcctcagtgtccttgtcctcatgaattttcatcgtatgtatctggcaaaacctaagttctggatcagtttgtctctttggccaacaaaaaaagcatttgttgagcagtgatggataaaaatcacacacaattacccagattagtggtactgcaaattcatggtctctagtccctgaaagagctgtcagggctgcattgcaattcttttattctccataggggctattttaatcattcttttctttctttaaacttaagaaagaaagtatcctccccggatggtctccccccttcatgggaaaacagaacccatgaaaaggagaccccttatatttcctgttacttgactcaccagtttatctcctccgtagcatttgttcttcctttccttcaatttcagtggatgagatgtttcctcatgctgcctcaggctgattctccaactgtgctctgggtcttattcttttcttcctgctgattaacgctatgtctttaatctctctcttaattctgattatttcccatctcactaataaacatgttcataaaacaaccaaaatacccctagacataagtctcatttcttactgcatgatatggtcagaaaataaaaaacaaaacaaaaacgaaacctcagttctttctagcttctgcctcctcctctcaccagcaaaacaaagccccaagcttgtgtacttctctgttgtctcatgttctgttcacttctccatacactataatgtcttctctcatcattcactaaaactgctcgctccaagatcatctggacttcttgctgctaaaaccataatcttatagaatgttcaaaagtacttgacacttgtcaaattgctgtcttctgttggcttctatgacagtacgcaaagcctcagctgtttctccttaggctcctttgctgccttctcttcttctgccaaatggaaatgttccttacttttttttttttaaatgcatttgccatcttggttttgtatcttttccaggactttatcatttgtatgttgatgccttccattttatccatctgagagcttgcatttgagcttctggctcacatatccagctacctactgggcatctctacttggatgtactgcagatacttaatgataacatatctacaactacattcttttttcccctattgctccaaatctgcttcatttcctttggttttagattcagtgattgtttccactatccatttagcttcgatcaggccaaaaatctagtgtctgttatctttgacctcacattgttcccagatcttatcagcgttacctcttaaaggggattcacttgcctcgcatatccctgcttctttcctatttcaagtgactatcatgctatttctagattattatggtattcttttccctggtgttctttcccccagcttttctagtcttttatccattttctactctccagccagactaattatgaaatgtaaacttaccctgttattctctgaagtatttaaatgattgatttcccattcattcagagaaaagttaaaattgctaattatttcccacaaaattgtttgtgatctaacttctgctgacttctctaacctatcgcttgtcccttactcctccctttctctcatatcccacccc

SEQ ID NO: 2654 - DNA, 136 bp, Homo sapiens
  source 1..136: mol_type = other DNA
attatagtagtatgttttccaccacgatagttaagattgtgtacacatattcaatatgaaatcctcttaggattttcacaccttcagcctgaaaacataaaagcagattaaagtttggcatacaagatctcagtct

SEQ ID NO: 2655 - DNA, 124 bp, Homo sapiens
  source 1..124: mol_type = other DNA
ttctcccgcagaggggacccccactgggggcgaaggcttggcctgccctcttcactgctgtatttccagacctgatgcctgcgtttgtgagagctctggatatatggttttcgattgaatgagt

SEQ ID NO: 2656 - DNA, 209 bp, Homo sapiens
  source 1..209: mol_type = other DNA
aaaaatcactggctttggaattaaatagcttagattgtactataaccactacttatgaactcagggactatgagggactattcaggggctatgaatctgagcctttgtttcttgaactgtaaagtggagatgatgtaaaccgccttgcaagattgtagagttgggtaaggtcatgaacataagggcctggcacaaagggtgcactgtaa

SEQ ID NO: 2657 - DNA, 1443 bp, Homo sapiens
  source 1..1443: mol_type = other DNA
ctaagatcaaaaacaagataagaataagaactctcactacctctaggcaacattgtactgcaggttctagccagtgaaaggcaaaaaactaaataaaaggaattcagattataaaggaagaagtaaaactatctgtattcactgatgacataaacacatgtataaaatctgacaaaatctacaaaaagcaggatataaaagcaatataaataaaccaattatattctttaatattagcaaattgaaattttaaaataacacaacagtatcaaaaacataaaatatcttagaataaatctgaaaaaagatgtacagtacttgtacactaaaagttataaaacattgctaggagaatatgaagaagatgtaaataaatggaaggacatacctcgttcatgagccagattactcaatattattaagatgtcaattctctccaaatacatctacatttaccacaatctcaatcaaaatcttaaaagcagggtttttggagagattgccaagatgattccaaaattcatatgaaaatgcaaaggacctagaatgcaaactctgaaaaagaaaaagaatacttagagagctaagctacctgacttcaagacttgttataaagctacaataaccaagaaagtgtgctgtcactgtcaatgtacacaaatagatcaaaagaatagaacagaaagtccagaataggcccacacatatatgggaagcagatttttttacaaaggtgcaaaggcaagttgatgcggacagaataatcttttcaacgaatggggctggaacaattttttaaaagaactttgatacatactttgtattatatacaaatattagcttaatttaatatatatcatatattaaatttaaaacctaaaactttaatacttcttaaaagaaaacataagagaaaatccttgtgacttcaatttaggcaaatatttcttagatgaaattccaaatgcatgatatatacaagaaaaatttgacaaactggagttcatcaaaactaaaatcctttagtctacaaaagacactgttaggaaaatgaaaagataagccacaggctgggatatctgcaaaagacttctatccaaaatatataaagaattctcaaaactaagcaataaggaaaccaccaacccatgttaaaaaaaaaattgagcaaaagattttcttagacttttcactagagacaatatacaggtggcaataaagcacaccaaaagaatcacatcactagtcattaagaaaatgcaagttaaaaccacaataatatatcactatacacctataaaagtggctaaaattcaaaagactaactattgcaagtattacctaggatgtggtaggaatggaactttcaaataccattggtgggaatataaaatggtacagctgctttattaaacagttttgtggttacttaaaaagttaaat

SEQ ID NO: 2658 - DNA, 131 bp, Homo sapiens
  source 1..131: mol_type = other DNA
gccgggcgtggtggctcacacctgtaatcccagcacactgggaggccgaggcagggggactgcttgagctcaggagttcgagaccagcctgggcaacaaagtgagactccatctctatataaaaacaaaaa

SEQ ID NO: 2659 - DNA, 96 bp, Homo sapiens
  source 1..96: mol_type = other DNA
agcaagctaatcaaaaggaaaaaaaaaaaatcaaaataatcaaaaacaaataaacaacaaaaatcaaagagtaatcaacaggaaaaaagggatcaa

SEQ ID NO: 2660 - DNA, 54 bp, Homo sapiens
  source 1..54: mol_type = other DNA
gagtattacatattcttctttgccttgagcctcatcactcagaaggtaaggaag

SEQ ID NO: 2661 - DNA, 584 bp, Homo sapiens
  source 1..584: mol_type = other DNA
tatccaaactatataagggactcaagtcaacaacaaagaacaaatgacccggtgtatgcaaaaatgctcagtatcaccaaccgttagggaaatgcaaatcaaaaccgcaatgagagagatcacctcatacctgttaggatagctgttattaaaaaacacaagataaagaatgttggcaacaatgtggagaaaagggaaccctagtgaactgttggtgagaatggaaattagtacagcctttatggaaaacagtatggcggttcctcaaaaaattaaaaatagaaccaccatttgatgcagcaatcccacttctgggtatacatataaaaaagagatgaaatcattatcttcaaaagatagctatactcccatgtttactgcagcatttccacaactgccaaactatgaaaacgacctaagtgtctattggtggacggattggtaagaaaatgtggcatgttattttttacaaggaaagaaatcctatcatttgcaataacatggaggaacctggagaacattatgttaatagaaataagccagacacaaaacaaataccacatgatgccacttacatgaggaat

SEQ ID NO: 2662 - DNA, 333 bp, Homo sapiens
  source 1..333: mol_type = other DNA
gctgtggcctgaatgtttgtgtcccccaaaaattcgtatattgaactctcatccctaaggtcaacagtttagggaagcgattaggtcctgaggactctgccctcttgcatagaattagtgctcttataaaagatgcccgagggagctcttttgcccctcctgccatgtgaggacacagctagaagctaccatctgtgaaccaggaagcccccctcaccagacactgaatctgctggagccaccatcttggacttcccagcctccagagctgtgagaaataaatgcctgttgtttaagctacccagtctgtggtattttgttagaacagcccaa

SEQ ID NO: 2663 - DNA, 90 bp, Homo sapiens
  source 1..90: mol_type = other DNA
tctcttctgagcctcagtttctcttctctatacaagtaggacagtcacatctgctccgaagactccaccaggctcttaggaagaaaaaat

SEQ ID NO: 2664 - DNA, 293 bp, Homo sapiens
  source 1..293: mol_type = other DNA
gccagatgcggtggctcacgcctgtaatcccagcactttgggaggtcgaggcgggtggatggcctgaggtcaggagtttgagaccagcctggccaacatggtgaaaccctgtctctattaaaaatgcaaaaattaaccaggcatggtattgggtgcctgtaatcctagctacttgggaggctgaagcaggagaattgcttgaacctgggaggcggaggttgcagtgagccaagatcatgccactgcactccagcctgggcaacaagagcaaaactctgtctcaaaaaaaaaaa

SEQ ID NO: 2665 - DNA, 319 bp, Homo sapiens
  source 1..319: mol_type = other DNA
ggccaggcacggtggctcacacctgtaatcccagcactttgggaggccaaggcaggaagatcatgaaatcaggagatcgagaccagcttgaccaacatggtaaaaccacatgtctactaaaaatacaaaaaacaaacaaacacaaaaaacctagccaggtgtggtggtgcgtgtctcatgcctgtaatcccagctactcaggagacagaggcaggagaattgattgaacccagtaggtggatgttgcagtgagccgagatcatgccactgcactccagcctggccaacagaatgagactatgtctcaaaaaaaaaaaga

SEQ ID NO: 2666 - DNA, 481 bp, Homo sapiens
  source 1..481: mol_type = other DNA
ctgcgccggcgctggggggcctttgcgagggcggagctgcgttctcctcagcacagactttggagatacagtgaaggcggagcaatgttcttctcagcacagacctgggcgggtcgggggcaccgcgagggcggagctgcgttctgctcagcacagactccggggacaccgcgaaggcagagcagggttctcctcagcacagaccttggggggcactgcctcgctttgggacaactcggggccgcatcgacggtgaataaaatccttcctgtttgcagccctgaataatcagggtcagagaccagttagaagggttcagtgtggaaaacgggaaaccaaaagcccctctgaatcctgcccaccgaagttctccccagccaaggcgaggcggccgcagtgcgagatacacaccgcagcctaggaagacaaatgcagcattcctaatgcagacatgacacccccattgctcatgtaacaagca

SEQ ID NO: 2667 - DNA, 444 bp, Homo sapiens
  source 1..444: mol_type = other DNA
ggtttaaaattaggcacatagaccaatggaacagaagagagaacccagaaattaacccaaatacttacagccaactgatcttcgacaaagtaaacaaaaacataaagtggggaaagggcacccttttcaacacacgatgttgggataattggcgagccacatgtaggggaataaaactggattctcatctctcaccttatacaaaaatctactcaagatggattaagaacttaaacctaattcctgaactataaaaattctagaagataacactgcataaacccttctagacattggcataggcaaggatttcatgaccaagaacccaaatgcaaatgcaataaaaacaaagataaatagctgggactcatttaaactaaagagcgagcttttgcattgcaaagggaacagtcagcagagtaaataggcaacccacagagtggg

SEQ ID NO: 2668 - DNA, 490 bp, Homo sapiens
  source 1..490: mol_type = other DNA
ctgcgccagtgatgtgcgcctctctgcgcctgcgccggctccctgcgtactcctcagcacagacccggagagcatcgccagggcggagctgagttctcctctgcacagacccggggaggccgggggcactgcgagggcgaagctgctttctgctcagcacagccccaggggactccgtgaaggcagagccgcgttctcctcagcacagaccttggggacactgcctcgctttgggacaacttggggccgcatcgacgatgaataaaatccttcctgtttgcagccctgaataatcagggtcagagaccagttagaagggttcagtgtggaaaacgggaaaccaaaagcccctctgaatccttcctagcgaggttctccctagccaaggcgatgcggccgcagtgcgagatccacaccgcagcctcacaagacaaatgcagcattcctaatgcagacatgacacccaaaatatgacacccccattgctcac

SEQ ID NO: 2669 - DNA, 1748 bp, Homo sapiens
  source 1..1748: mol_type = other DNA
atatatgcctagctacagaaatcagaaacaaaataaacaatctaacaatgcaccttaaggaactagaaaagcaagaataaacaaaacccaaagtgagtaaatgaaaacaaatgataaaaatcttagcagaaatgaataaaaattagactaaaaataatacagaagatcaattaaaaaaagttgttttttgaaaagacaaacaaattcaacaaatctttagccagaataagagagaagacctaaataaaatcagaaaccaaaaaaggagtcataaaaactgagaccacagaaatacaaataatcattagagactattacaaacatctataaattaataaattgaaaacttagaagaaatgaataaattcctgaacccatgcaacctacaagtttgaaccatgaagaaatagaaaacctcaacaaaccaatagtgaataatattattatgagtacctttattatgactgaagtcataataaaaattttcccatcaaaggaagaccttatggctttattgttgaattctatgaaatatttaaaaaagagattataccaattcttctcaaactcttttaaaaaattgcagtagagtgagtacttcccaacctcttctaccaggccaacattattctgatacccaaaccagacaaggacacacaaaaagagaatactacagagcagtatcactgataaacatagacgcaaaaatcttcaacgaaatactagcaaaccaatttcaacaacacattaaaaagatcttacaccataatcaactgggattcattccagggatgcaaggatggctcaacatatataaatcaataattacattactaagcaagagcaaaaaacgtacgatcatttaaataaatgctaaaaaaaccactcagtgaaattccacatctctttaagataaaatccctccacaaactgggtatagaatgagcatacttaagaataataagagccaaatatggcaaatgacaactagcgtcttactcaatggagaaaaatggaaagcctttcctctgggatctggatcaagactaggatgcctactttcaccacttttattcaacatagtactgaaagtcttagcaagagcaattaagcaagagaattaaagaatattccaaattggaaaggaagaagctgaattatccttgtttgcagatgacataatgttatacttaaaaaagaccctgaagatgccatgaaaaaactcttagaacagataaatgaatgcagtaaagttgcaagatggaaaataaacatacaaaaatcagtagcatttatatatgccaacagagaatgatctgaaaaagaaataaaaaaattaccatttacaacagctacagagaatatgaaacacctaggaatcaatttaaccaaagaagtaaaagatttatacaagaaaaactgtaaaacattgatgaaagaaattgaagaggacagaaaaaaggaaaactattccatactcattaattagaaaaattaatttgattcatatgacaatattacccaaaacaatttataaatcaatttcactccctatcaaaatactcatgtttctcacataaatagaaagcaaatcctgaaattgatatagaaccacaaaaaacccagtagccaaagcaatcctgagcaaaatgaacaaagcttggagacatcacactatatgacttcaaaatttactacaatgctatagtaaccaaatcaacatgttcctggcataaaaacagaaacat

SEQ ID NO: 2670 - DNA, 278 bp, Homo sapiens
  source 1..278: mol_type = other DNA
ccgggcgcggtgggtcaagcctggaatcccagcactttgagaggccgaggcgagtgaatcacttgaggtcaggagattgagacgagcctggcaaaagtggtgaaactccgtctctactaaaagtacaaaaatttgtcgggtgaagtggtgggtgtcagtaatcccagctacttgggaggctgaggcaggagaatcgcttaaacctggaaggcggaggttacagtgagccaagatcgcactattgcactccagcctgggcgacaagagcaaaactccgt

SEQ ID NO: 2671 - DNA, 2854 bp, Homo sapiens
  source 1..2854: mol_type = other DNA
aatgatgatgtgagggcatatgcaaattatctcccccacataaacaattaaaaatgtgcaaaaataatcagaatcagctcttttaaaactcttaaataatttatttaataaacaaagaaccaaaagagaaagaaaggttaaattatggtaagagctgtaagctttgtggtattttaggctgcttattctcatcaccctctctcaagttacacagtcaccttgaaaataaatatctctcaatcgctgactactagcaatctggcagccttcagcttagttccctgagaattattgtttgacctggaacatggcttactgcaagataccacttataaaactgtctttatttgacctcatttgtaactggcccatgaaagtctttttaactagcatacttattgaaaacattgaaaggcaacttttttaaatcatggtagactaaagtggtagataacagttagggcaaataatatggtagctggaaaacttaaaaagctaggaaatataaataggagttttgaagacttctgacatattactggcactataaaaggtcactcacacacgtatgattgtgcacattctaagcacaatgcttattctcaagaaaaatatgagaaggccctaagctttcacctccagatgaccatgaagctatgggaaagcagaatgtgaagactaaggcagagttgtcaaccaaccggctgggtgttaaaagtgtgccctgaaatgcacacagagccactcagcagagaccggaagagttacgggttccaggtctttaatgaaatttctgtctattctttcactgactactaagttaagcaaacagagacttcagtgttcaaacatgatgacaaacaaaaactttagacaattagttcagaaaagtcactaaagaaacaaatgacaaaaacaaatagcaaaatcaacaaaatttgaagggagtaaaatataattttcagagttgtcacatttttattatttaaaatgttcagttttcaacaaaaatttataaggcatacaaaaagtaagacaatatgtatggctcacacacaggaacaacacgcaatcaataaaaccgtccatgagaaagctcaggtgtttggcttagtagacaaaggtttttaaatccaccatgataaaaatttgtttaataactaaaataagctatttctaaaaagctaaaggaacatttgagaataaatgtctcaccaaataaataatactaataagcaattctataaataatatatattaattacagaattaaaatgtataataactgtataaaaatgtactagagtgacttaacagcagattttagaaagcagggaaaagagttagccaacttaaatataggtcaatgagattatctaatgcaagaaacagaaggaaaaagaaataaagacaaatggacagactcagagatatcatcaagcatagcaaaatatgtataatggaagtcccaaaggaagagggaacagaagagaaatggggcataaaaatatgtgaagaacaatacaaaacatacttaaaaacttccaaaatttgacaaagaatattaacttgcacatccaaaagatctatgactcccaagtaggataaactcaagagattcacatttttaaaaaattataattaaacaatcaaaagaaaatgacaaagaaagaatctgaaaacaaaaaaagaggagcaactcttcatgtgcaaaagagtctgaataatttttcactgatttttcattagaaaccatggaaaccagaggcagagagatgacatttttaaagttttgaaagtaaatgactatcaacgaataatttcataaccaacaaaactatacttcaaaaatgaaaaagaagtgaaaatattctcacttattctctgaaaccaaaactgacagaatctcttactagcaaagtttccatgcaagaaatattaaaagaggtatttcaatatgaaataaaattacacttgacaatatctagagtccatataaacaaatgcagaacaatagaaaaagcaaaaattagaaatatatgaaagagaatgtaaatttattttttgtaactattttcttttctcctacctgattcaaaaataaactgcataaagcaatggttataagtaatacaatgaataaagatgtaatgaataaagatgaatacagtgaattcatacattgaataaatatgtaatatgtatagtaatacaacaaaggaaggagagaacaatgctatttagaatcaaaatttttgtatgctattaaaattaagttgatagtaaatctaactagattttcaaaaattaagatactacttgtagcccatcaggcaaccctaagaaaataacttacaaactataataaaatcagtgataaggggattaatacagtgcattaaaaatatctattgactaaagaaaaggcaatcttagaaaaatagagaaataaaaaagcagaagacatatagaaaacaactggtaaactggcaaacataaattctatatatcagtaattacattaaatgtatatagattacaaactccatttaaaatagagtttgcagatgggtttagaaaaaacataatccaactatctgttttattcagcagacacactttatattcaaagacacaaacagtttgaatacaaatgactgaataagataaatcattcaaacagtaatcaaaagagacctggtcataataacacacaaaacaaacttcaagagataaattgtgattagtgagaaagagtattttacaattatagaaaggattaatacatcaagaaaacataacaataagcacatatgcatctgtcaagataatcccaaaatacatgaaggaagaa

SEQ ID NO: 2672 - DNA, 385 bp, Homo sapiens
  source 1..385: mol_type = other DNA
gcaatggattaaatggttgtttttctccccccacccaaattcatatgtcaaaatcctaacccacaatgtatggtactaggaggtggggtctttgggagcaaattacatcatgagactggagcccatgtgaatgagattagcacccttataaaaaagaccccagagaactctcttgctctttttctattgtgtgaggatataaagaaaagacggcagtctacaagtcagaagagggtcctcacaagaattaatccatgctggcactctaatctcatatttctgaactcaagatctgtgagaaataaatttctgttgtttataaacccatccagtttacaaagtgcctagtctatggtactttgctctggcagcacaaactaaaaca

SEQ ID NO: 2673 - DNA, 1161 bp, Homo sapiens
  source 1..1161: mol_type = other DNA
aatgtaagacctcaaactataagaatcctagaagtaatgctaggaaacaccattctgaaaatcagccttgggaaagaatttatgactaagtcctcgaaagcaatttcaacaaaacaaaaattgacaagtgggacctaattcaactaaagagcttctgcacagtaaaagaaactatcaacagcataagcaaacaccccacagcatgggcgaaaatattcacaaacaacgtgttcaataaaagtctcttatctggaatctataaggaacttaaataattaagcaagcaaaaaacaaataattttaaaaatgagcaaaaccatgaacagatacttctcaaaagaaggcacacaagtggctaacaaacatgaaaaaaatgctcgtaatcactaatctcagagaaatgtaaatcaaaaccaaaatgagatatcatctcacactagccagaatggctattaataaaagctccaaaaatgtttaataatatattttattgaaaagttcctgccaaggctatagaagaaggggaatgtttatacactgttggtgggaatgtaaattagttcagcccatggggaaagtagtttggagatttctcaaagagcttaaaacagaactaccatttgacttaataatcccatttctggttatatatccataagaaaatataccaaaaagacacatgcacttgtatgttcattgtagcactattcccaatagcaaagatatggaatcaacctaagtgcccatcagcagtggattggataaagagaatatggtacatatacactatggaatactacacagccataataaagaacaaaaccatctatttgcagcaacatggatgcaacttgcagccattatcttaagtgaattaatgcagaaacagaaaatcaaataccacgtgttctcacgtgtaaatgggagttaaacacagggtactcatggatatgaaaacggcaacaatagaaactggacactgctagagggagaggaagggagggagggagaccggggttgaaaaactatctgttaggtactatgctcagtacctgggcgacgggcttaaccgtaccaccaacctcagcatcacgcaatatatccatgtaacaaacctgtacatgtgttccataaatttaaaataaatgttcaaataaaaaa

SEQ ID NO: 2674 - DNA, 610 bp, Homo sapiens
  source 1..610: mol_type = other DNA
aatggttaattctgcagacatggctttccaaaaccttgcgcattccaaaggtcttcagcactggcccttgacaacctcctgggagatgacaacctatgagcccttggtatatgctgcctgatgagagtctttgtatacttgaaaacgtaggtcataccaaatagctgatgctaacaacgttatttcttgtgagcacctgtttctgtatgcctatgactttgtgtaatgccatattaatatgacctctcagggcatagggaggttgggaactaagtagctaagttcagtcacaggatgctcgatgcatatgtggtggaatcctaataaaaaccctggactcaagactgactgagcttccctagttggcaacaagttcacacatgttgtctcacatgattgtaaagaaaattagtcagtgtgaagtccccactatgaaaggacacctgtaagctcatatctggtttgtcctggactcaactttatgtgcttttatgcttctgattattttaatctggtttctttcactgttagaaactataaccacaaaaaaaatcagctttcttgagttatgtgaatcattaaaccaaagggggacttggggacccccaat

SEQ ID NO: 2675 - DNA, 9900 bp, Homo sapiens
  source 1..9900: mol_type = other DNA
tgcttctgggttctgagagtttgtcactaacataggattccagaacactgctgcagggttctgagtgattgttgctcacatgggattcaaaaacactcctgctgggttcagagtgttatccctcacatacgattccagaacactgctatgaggttctgaatgtttgtccttcacaaaggattccagaacactgctgctgggttctgagtgtttgtccctcatataggattccagaacactgctgctgggttctgagtgtttgtccctcacataagattccagaactctgctatgaagttctgaatgtttgtggctcacataggattccagaacactgctgctgggttctgagtgtttgtccctcacataggattccggaacaatgctgctgggttctgagtgcttgtcccttatattggattccagaacaatgttatgagggtctgaatgtttttccctcatgtaggattcaagaacactgctaagagggtctcaatgtttttccctcacaaaggattgcagaactctgctgctgggttctgagtgtttgtccctgatataggattccagaacactgctatgagggtctgaatgtttttccctcacaaaggattccagaacgctgctgggttctgtttgtttgtcccccacaaaggattccagagcactgctgctggtttcttagtgtttgttccacacatgattccagaacacttctgcgatggtttgaatatttctccctcagataggattccagtacacagtggctgggttctgagtgttggtccctcacataggattccagaacactgcttctgggttctgagtgtttgtcactcacataggattccagaacactgcttcgagggtctgagtgtttgtccctcacaaaggatgctggaacactgctgctggtttctgagtgtttgtcactcacagaggattccagaacactgctgcttccagaacactgctgctgggttctgagtgtttgtccctcacataggattccagaaaactgctatgagtgtctgaaggtttgtccataacaaaggattccagaacaatgctgctggatctgaatgtttgtccctcacacaggattccaggacactgcttcgagggtctgagtgtttgtccctcacacaggattccagaccactgcttctgggttctgagtgtttgttccacatataggattccagaacacagctacaaggctatgaaagtttgtctctcacaaaggatttcagaaaaatgctgctgggttctgagtgtttgttcctcacataggtttccagaaaactgctgctgggatctgagggattgtccctgtcattgagtacgagaacactgctgctgggttctgaaggtttgtccttcacttagaattgcagaatactgctgctaggttatgagggtttgtccctcatgtagaattctagaactctgctgctgggttctgagcatttctctatcacatgagattctggaacactgctaaaatgtaggaatgtttgtccctcacaaagagtccagagcaccgcttgtgggttctgagtgtttgtccctcacataggattgcagaacacagctgctaggttctgagtgtttctcccaaacataggattccaaaacaccgctcagagggtctgaaagtttcttcctcaccaaggattccagaacactgctgctgggttctgaaagtttgtccctcacatacgattccagaacactgctatgaggctctgaatgtttgtccctcaaagggattccagaacactgcttttgagttctgagtgtttgtccgacacaaaggattccagaacactgctgctggcttctgagtgtttgtccctcacataggatttcagaacactgctatgagggtctgcatgtttttccctcagaaagcattctgtatcactgctacgagtgtctgaatgcttgtccctcacataggattccagaacactgctactgggttctgactgttggtccttcacataggattccagaacactgctccgagggtctgaatgtttgtccctcacataggattccagaacatttgctgctggtttgtgagtgtttgtccctcatatgggattccagaacacttctgctgggttctgtttgtccctcatataggataccagaacactgctattggcttcagagtgtttgtccctcacataggattccagaaaacttctaagaggttccgaatgttttccttcagataggattccagaacactgctgctgggttctgagagtttgtccctcacataggattccagaacactgctaagagggtctgaatgtttgttcctcagataggattccaggacactgctgctgggttgtgtgtgtttatcactcacatagaattccagaacactgctacaagtgtctcaatgtttgtccctcacatagaattccagaatattcctgctgtggtctgaatgtttgtccctcacatatgattccaggacgctgctgctgtgttctgcgtgtttgtcccccacataggattcaagaacactcctgctgtcttctgaacgtgtgtccttcacagaggattccagaacactgctactagcctctgaattgttgtcccccacagaggattccagaacactggtactagggtctgaatgtgagtctctcacataggattccagaacactaatgccggggtctgaatgtttgtccctcacctaggattgcagaacactgctacgaggttctgaatctttgtccatcacgtagcattatagaacactgctacgaagttctgaatgtttttccctcagagaggatcaaagaacactgctgctagtgtctgaaattttgatgatcacgtaggattccagaactctcctgctgtggtctgtatgtttgtctctcacataggattccagaacactgctacgagggtctgaatgtttgtccctcacaaaggattctagaacactgctgctgggttctgagtgattgtccctcacataggattccagaacactgctgctgggttctgagtgtttgtccctcacataggattccagaacactgctacaagggtctgaatgtttatccctcacaaagggttccagaacactgttactggattctgagtgtttgtccctcatattggattccagaacaatgctacgagggtctgaatatttttccctcacataggattcgaaaacactcttacgagggtgtgaatgtttttccctcccaaaggaatccagaacactgctgctgggctctgaatgtttgtccctcatataggattccagaacactgctacgaggatctgaatgttttcccttacaaaggattgtagaacactgctactgggttctgtttatttgcccctcacaaaggattccagagcactgctgcatatttcttagtgtttgcccctcacataggattccagaacacttctccaaggttctgaatgtttgccctcagataggattccagtacactggctggattctgagtgtttgtccctcacataggattccagatcactgctacaggttctgaatgtttgtccctcacaaaggattctagaacactgctactggtttctgagtgtttgtccctcacaaaggattctagaacatggcttctgggttctgtgtgtttgtccctcacataggatgccaaaacactgatgctgggttctgagtgtttgtccctcacatagcattccagaacactgctgctggcttctgagtgtttgtccctcacatacaattccagaacactgctacgaagttctgaaggtttgtcgctgacataggattccagaacactgctgctgggttctgagtgtttgtccctcacataggattccagaacactgctacaagggtctgaatgtttatccctcccaaaggattccagaacactgctgctgggttctgagtgtttgcccctcaaataagattccagaacactgctatgagggtctgaatgtttttccctcacataggattcaaaagactgttacgagggtctgaatgtttttccctaacaaaggattgtagaacactgtcactgggttctgtttgtaggtccctcccataggattccagaacactaatacgagggtctgaatgtttgtccctcacataggattccagaacagagctgctgtgtcctgattgcttgtctctcacaaaggattccagaacactgatgctgggttctgagtgttcgtctatcacataggattccagaacaaagctgctgggtcctgattgtttgcccctcacaaaagattacaaaacactgctacgagggtctgaatgtttgtccctcatataggattccagatcactgttgctgggttctgagtgtttgtccctcacataggattccagaacactgctgctgggttcttcgtgtttgtacctcatataggattccagagcactgctacaagactctgaatgcttgtcccttacataggattccagaacactgttttgagagtctcaatatttgtccctcacaaaagattgcagacaactgctgctgagttctgagagtttgtccttcacttaggaatccactgattctgggttctgaatatttgtccttcacataggattccagaacagtgctgctggcttctgagtgattgtcccgcacgtaggattccagaacactgttacgagggtctgaatgttcttccctcacaaaggcttccagaacactgctgctggtttctgtttgtttgtccctcacaaaggattccagagcactgctgctggttatttagtgtttgttgcccacataggattccagatcacttctgcgaaggtctgaatgtttagccctgagataggattccagtacacactggctcggttctgagtgtttgtaccacacactggattccagaacactgctgctgggttctgagtgtttgcccctcacataggattccagaaaactgctatgaggaccttaatgtttgtccatcacaaaagattctagaacaatgctgctggatctgagtgtccctcacataggataacagaacactgcttcgagagtctaaatgtttgtccctcacaaaggattctagaacattgctgctggtttctgagtgtttgtcactcacataggattccagaacactactgctgagttctgaggctttgtatctcacatagtatttcagaacactgctatgaggttctgaatgtttgaccctcacagagcattgcagaacagggctatggggatctgaatgcttgtccctcacatatgaatccagaacactgctgcagggttcagagtgtttatcccacacataggattacagagcactgttctgagcatctgagtgtttgaccctcacaaaggattgcagaacactgctgctgggctctgagtgtttgtcccttacataggattctagaacactgctgctgggttctgagtgtttgtctctcacataggattccagaacacttctctgaggatctgaatgtttgtccctcacaaaacattccagaacactgctgctgggttctgagtgtttgtccatcaaataggattccagaacacggctgatgggctctgtttgtttgtccctcacaaaggattccagagcactgctgctggtttctgaatgtttgtccctcacataggattccagaacacttctacgaggctccgaatgtttgtccttcagataggattccagaacacagtggatgtgtgatgagtgtttgtccctcaaataggattccacaacactgctttgagggtctgaatgtttgtatctcacaaaccagtctaaaacactacttctgggttctgagtgtttgtccctcacatagaattctagaacactgcagctcgtttctgagtgtttctccgtcactttggattccagaacactgctaagattgtctgaatgttcgtcccttaccaaatattccagaacagtgctgctgggttctgagtgtttggccctcacattggtttccagaacactgctgtgattgtctgaatgtttgtccctcacaaattattccagagtactgctgctgggttctgagggtttgtctctcacatagaattaaagaatactgctgctgagttctgagattttgtacctcacatatgattccagaacactgctatgagggtctgaatatttgttcctcacagagcattccagaatggtgctatgagggtctgaatgcttgtccctcacataggcagggttctgagtgtttgtccctcacacaggactccagaacactgctctgagagtctgagtgtttgaccctcacaaaggattccagaacactgctgctgggttctgagtgtttgtcccacacataggattccagaacactgctgctgctttcttagtgtttgtctctcacataggattccagaacactgctgcgaggatctgaatgttgtccctcacaaaggattagagaacactgctgctgagttctgagtgtttgtccctctcattggattccagaacactgctgctaggttctgagggtttgtccctcacataggattccagaacactgctgctggtttcttgggtttgtctctcacataggattgcagaacactgctacgattatctgaatgttgtccctcacaaagtattacagagcactgctgctgggttctctctgtttgcccctcacattggattacagaacactgctgctaggtttgagggtttgtccctcacataggattccaaaacactgttgctgggttctgagtgtttgtccctaacatacgattccagaacactgctatgattgtctgaatgtttgtccctcacaaagtattccagagcactcctcctgggttaagagtgtttgcccttcacataggattccagaacagtgctgctgggttctaagtgtttgtccctcacataggattccagaacactgctacgaggatctgaatgtttgtccctcacaaattattccagagtactgctgctgggttctgagtgtttgtccctcacataggattccagaacactgatacgaaggtctgaatgtttgtccctcagataggattacagaacacagctacgaggttctgaatgattgtccctcacataggattccagaacacagtggctgggttctgagtgtttgtccctcatataggatttcagaacactgctatgaatttctgaatgtttgtcgctcacagaggattctagaactctgcggctgggttgtgttttccccccacataggattccagaatactgctgctgggttctgagtgtttgtccctcacataggattccagaactctcctgctgggttctgtttgtttacccctcacaaaggaatccacagcactgttgctggtttctgagtgtttgtccctcactcaggataccagaacactgctacgatggtctgaatgtttgtccgtcacaaaggattcataacactgctatgggttctgactgtttgtccctcacaatggattccagaaaactgctttgagagtctcaatgtttgtccctcacaaagtattccagagcactgctgcggggttctgtgtgtttgtccctcacatgggattcaaaaacactcctgctgggttcagagtgttttccctcacataaaattccagaacactactacaaggttctgaatgtttgtccctcacataggattccagaacactgctgctgggtttcgagtgtttctccctcacataggattccagaacactgctgctcggttctgagtgtttgtccctcacatagcattccagaacacaggtacgaagttctgaatgtttgtagctcaagtaggattccagaacaatgctgctgggttctgaatgtttgacactcacacaggattccagaacactgctgctgggttctgagtgtttgtccctcacataggattccagaacactgcttcgagggtctgaatgtttttccctcacaaaggactccagaacactgttgctgggttctgagtgtttgcccctcatataggattccagaacaatgctacgagtatctgaatgtttttccctcacataggattccagaacattgctacgagggtctgaatgtttttccctcacagagtattccagaacactgctgctgggttctgaatgtttgtccctcacataggattccagaacactgcagctgggttctgagtgtttgtccctcactttggattccagaaaacgtctacgacggtctgaatttttgtccatcacaaaggattttagaacactgctgctggatctgagtgtttgtccctcacacaggattccagaacactgcttcgatggtctgaatgtttgtccctcacaaaggattctagaacactgctgctggtttcttagtgtttgtcactcacataggattccagaacactgctgctgggttctgagtgtttgtccctcacatacgattccagaacactgctatgaggttctgaatgtttgtccctcacaaaggattccagaacactgcttctgagttctgagtgtttgtctgtcaaataggattccagaacactgctgctgggctctgtttgtttgtccatcacaaaggattccagaacactgctataggtttctgagtgtttgtccctcacataggattccagaacaattctacgaggctccgaatgtttgtccttcagataggatttcagaacacagtggctgggttctgagtgtttgtccctcacatagggtatcagaacactgctgctgggatctgagcgtttgtctttcacagaggattccagaacactgctgctttgttctgagtgtttgtccctcacataggattccagaacactgccgctcggtactgagggtttgtcccttacatagaattctagaacactgcagctcatttctgagtgtttgtccctcacttaggattccagaacaatgctacgattgtctgaatgtttgttccttaccaagtattccagaacactgctgctgggttctgagtgtttggcactcacattggtttccagaacactgctacgagggtctgaaaatctcgcacataggattccagaacactgctaagatggtctgaatgtttttccctcagaaaggattctggaaccctgctactggattctgtttgtttgtctcttacaaaggatttcagagcactgctcctggttgctgagtgtttgtccctcacaaaggatttcagagcactgctcctggttgctgagtgtttgtccctcacataggattccagaacacttctacgagtgtctgaatgtttgtccctcagataggattccagaagacagtggatgggttctgggtgtttgtccatcacataggattccagaacactgctgctgggttctgagtgtttgtccctcacataaggttccagaacactgcttctgagtgtttgtccctcacataggatcccagaacactgttgctgggttctgagtatttgtccctctcatgggattccggaaacctgctgctgagttcagagtgtttttccctcacataggattccagaacactgctgctgggttctgagtgtttgtccctcacattggattccagaacactgctgctgggttttgagtgtttgtccctcacatagaattccagaacactgctgcgaagttgtgaatgtttgtcgctcacacaggattccagaacactgctgctgggttctgagattttgtccctcacataggattccggaacactgctatgagggtctgaatgtttatcccttacaaaggattacagaacagttctggaatcctatgtgagggacaaacactcagaacccagcagtgttctggaatcctatgtgagg

SEQ ID NO: 2676 - DNA, 2132 bp, Homo sapiens
  source 1..2132: mol_type = other DNA
ccattgtcaatgtttctattttaacatagcagtgaaagtactttgcagaagaattagtcaagaaaatgaccctaaaaatgacattcaaattgaggaaaaaaattaaaatgttgctgtttgtaggtgacatgatcttatatatagaaaaccataaacaatacatcaaaaaataacaaatgccctcagaaaattagcaatatataacattaacatataattatcagttatgattccatatgctaacaacaaaccatctgataaaaaaggaagaaaacaatctcatttccaatagaattaaaataataaatttctgaaaaataaatttaacaaagaaggcaaaagatcttttcactgaaacatatattgatgaaagaaatggaagaagtcacaaacaaatgcaaaaagatttcaagcttatgaactggaagaataaatattataaagtaccatatgattcaaagtgatctacagcttcaatgaactctctattaaaaatccagtgacatttttcacagtaatggaaattacaattctaaaatttacatgaaactatgataggctttgaaaaaccaaagcaatctagaggaaaagggacaaagcaaccaaacttcatactttatgatttcaaactatattttaagattgtagtaaaaaaacaggatgatacatgcaaaatatggacacaataaaccaatggaacagaatagagcccagaaataaacccaggcatataaagtttactaatctttgacaagtgcaccaaaaatacacaatgaacgaagtatagtctttttaatatttggttctgaaaaaactggataccttcaggcaaaagaataaaattagcttatttttcttacaccatgctaaaagttaaattacagacttaaatatgaatccttaaaaaacctgaaaaagaatacatggaaaaccctcatgatatggtcttaacaataatttgttagacataataccaaaagtacagcaacaaaagcaaatataaacaagctggactgcatcaaactaaaaaccttctgcacagaaaagggaacaataaaataaaaaaatttgtagaatgggaaaaaatatttgcaaaccatacatctgataaaagattgatatacaaaatatataagaaatgcaagcagattgaaagcaagaacaacagtaacccagttcaaaataggcaaaaatctaaactgatatttgtccaatgaagacatacaaatggccatacatatggccataagccataaagtactcaatatcaccaaatatcaggcaattgcaaatcaaaaccatgatgagtatcatttcaaacatgttagaatggataatgtaaaaagaagaaacataacaagtgttgacaacactttgaagaaaaaaaattctgtacattcttggagagttataaattgatggagtcattacaaaaaccaatagaggttatctgaaatacagaactactacacaatctagcaatagtagtattgtgcatataatactgtgtatataacaaaaggaaatgaaataagtaacttgaagacatatctgtactaccatatttgttgcagcattattcacaattgccaagatataaaaaacctaaatgtttgtggatgctgaataaagaaaagctggtataaataaacaatagaatattatttagcctgaaaaataacaaaatcttgccatttcaacaacatgggtaaaactggaagaccttatgccaagggaaataagccagacatagaaagagaaatactgctcattctcacttatatggggaatctaagaaagctgaactcacagaagcagagactacaatggaagttgtcagggactagatatgggagaaaatgaaaagatattgaaaagacacaaattttctgttatgagtaagtttttcaaatgtaatgtatatcttcatgatacagttaacactaaatttttgtatgcttaaaatttggtgtcagcagatcttagaggttttcattacaaaaaaggtacctatgtgaggaaaggtgataaaaatgctcataaacataattgtgctaatcattttataatatacacatgcagtaagtcattacattgtacacaataaatatatatacaatttttatttgtaa

SEQ ID NO: 2677 - DNA, 411 bp, Homo sapiens
  source 1..411: mol_type = other DNA
gatatgatttggatgtttgtacccttcaaatctcatgttgaaatgggattcccaatgtaggatgtggatccttgtgtgatgtgtttgggtcatgggagcaaatctcttgtaaatgacttcgcaccatccccttggtgatcaataagttctcactctgttaattcacatgagagctgcgtgtttaaagaacctggcactttcctttcatgcttgctccctctctccccatgcaatatgtctggtttctctttgccttcactatgattgtaagcttacttagaccctcaccagatgcagatgctggcaccacacttattgtacattttgcataactatgaagaaaataaatcttttttctttataaattacacagtcttaggtacttattgcaatacaaaatgaattaataca

SEQ ID NO: 2678 - DNA, 327 bp, Homo sapiens
  source 1..327: mol_type = other DNA
gagtttcagcacatgccacagactggctaaaatgttttccttccctgttcgctcaactgcttccttttcattcttcattccttagtgtagctatacattcctcgggggaattttccatgagcctagtatagatctaaatcttagcaatctgttttcttacagtatctatctgaatttataactgtcacttttctggggctttgtcttttagcacattttaagttaaacaaaggcagaggtttttgtttttttctgtttaatctgcagagcttagtataatgccttccacgtggcaggcaatcaatatatatttgatcagtgtatgaa

SEQ ID NO: 2679 - DNA, 512 bp, Homo sapiens
  source 1..512: mol_type = other DNA
ttaagtacaatgagttctgagttcctcatcaaagaacaaatatgtcagtatgttcagcttctctgttctttgttctccgttttaaagtttaacttcctcgttcgttatgcctccttgcccctagtttcattaaacagcccccttctagcctctaacacctgctttgtctttagtcattcttagtaacctgctctgtccttagtcatccttagacacctgctctgtaactgtctttcccgctgaaactactcaccctgccactccagctcatacccctgccctctttaaatagccaatctgaattggcttagagtgtgcagtccaaccctatccaatagggaaaagacacaacagtagggactagctgcgttagaaataagaacactttcccctcccttgtccggtgtgatcttgccattgctccatctgcaagaccactcttccatagaagtaaatttgccttgctgtaaaaacttgttgctggagtgctgacggttctttgcggcgctgaa

SEQ ID NO: 2680 - DNA, 313 bp, Homo sapiens
  source 1..313: mol_type = other DNA
gctgggggcggtggctcacacctgtaattccaacactttgggaggccaaggcaggcagaccacatgaggttgggagtttgagaccagcctgaccaacatggagaaaccccatctctacgaaaaatacaaaattagccgggcgtggtggtgcatgcctgtaatcccagctactctggaggctgaggtaggagaatggctttaacccgggaggtggaggaggttgctgtgagctgagattgcaccactgcactctagcctgggcaacagagcaagactccatctcaaaaaaaataaaaaataaataaaaaataaa

SEQ ID NO: 2681 - DNA, 11474 bp, Homo sapiens
  source 1..11474: mol_type = other DNA
ctgctatgaggttctgaatggaaaaggaaatatcttcacataaagacaagaaagaagcattctgagaaacttctttgtgatgtgtgcattcacctcacagagttgaacttttcttttgatttagcacttttgaaatactctttttgtagtgtctgcaagtggatatttggagcgctttacagcctatggtggaaaagtaaatatcttcacatcaaaaccagacagaagcattctgagaaactcctctgtgatctgtgcattaatctcacagagttgaatgttctcttgattgagcagttttgaaacactctttttgtagaatctgcaagtggatattttgagtgctttggggcctatggtggaaaaggaaatatcttcacataaaaactagacagaagcattctgagaaacttctttgtgatgtgtgaattcaactcacagagttgaaatattcttttaattgagcagttttgaaacactctttttgtagtatctgcaaagttggagggctttgggacctctagaggaaagggaaatatcttcccttaaaaactagacagaagcattctgagaaacttctttgtgatgtgtgcattcatctcacagagctgaacatttcttttgattgagcagctttgaaacactctttttgtagaatctgcaagtggacattcggagcgatttgaggcctatggaggaaaaggaaacatctgcacataaaaactacacaaatgccttctgagaaacttctttgtgatgtgtgcattcatctcacagaactgaacctttcttttgattgaacagttttgaaacacttcttttgaaggatctgcatgtggatatttggatcagtttggggcctgtggtagaaaaggaaatatcttcaaataaaaactacacagaagcgttctgagaaagttctttgtgatgtgtgcattcaactcacatagttgaagatttcttttgattgagcagttttgaaacaatctttgtgtagtatttgcaagtggatatttggagcgttttgaggcctattgtagaaaaggaaatatcttcacataaatactagacagaagcattctgagaaacttctttgtgatgtgtgcattcatctcacagagttgaaactttgttttgattgagcagttttgaaacactctttttgtagaatctgcgagtggatacttggagtgctttgagctcaatggtggaaaaggaagtatcttcaattaaaaactagacagaaacattctgagaaacttcttcatgatgtgtgcattcaactcacagagtttaaactttcttttgattgaggagtttggaaaatctctttttgtagaatctgcaagtggatatttggagcgctttgcggcctatagtggaaacggaaatatcttcacataaaaactagacagaagccttctgagaaactcctttgtgatgtgtgcattcatgtctcagagatgaacctttcttttgattgagcagttttgaaacactctttttgtagaatctgcaagtggatatttggagcgctttgcggccaatggtggtaaaaggaaacatcttcacataaaaactggatggaagcattctgagaaacttctttgtgatttgtgcattcaacacacagagttgaaactttcttttgattgagcagtttgaaacactctttttgtaaaatctgcaagtggatatttggagcgccttaaggtctatggtggagaaagaaatatcttcacataaaaactggacagaagcattctgagaaactactttgtgatgtgtgcattcatctcacagaattgaaactttcttttgattgagcagatttgaagcacactttttgtggaatgagcaagtggatatttggagggcttcaagacctatggtggaaactgaaatatcttcacctaaaaacaacacagaagcagtctgtgtaatttctttctgatgtgtgcattcatctcacaaagttgaacatttctttggattcagcagttttgaaaaacactttttgtagtatctgcaagtggatatttggagccctttggggcctatggtggaaagggaaatatcttcacctaaaaactacacagaagcattctgagaaacttctttgtgatgtgtgcattcatctcacagagttgaacctttcttttgattgagaagttttgaaacactctttttgtggaatctgcaagtggatatttttaacacttgacagcctatggtggaaaaggaaatatcttcacataaaaactagacagaggcattttgagaagctcctttgtgatgtgtgcattcatctcacagtgcttaacatttcttttgatttagctgctttcaaatattctttttgcagaatctgcaagtggatatttgaagcgctttgaggcctatggtggaaaaggaaataccttcacataaaaactagacagaagcattctgagaaacttctttggggtgtgtgcattcatctcacagagttgaacctttcttttgattgagcagttttgaaacactctttatgtataatctgccagtggttattttgagcgctttgagtcttctggtggaaaaggaaatattttcacgtaaaaagtagacagaagcattctgagaaacttctgtgtgatatatgcattcatctcacagagttgaaccttacctttgattgagcagtttttaaacactctttttgtagaatctgcaaaaggatatttggagtgctctgaggccagtggtggaaaaagaaatatcttcacataacaactagacagacgcattgtgagaaacttctttttgatgtgtgcattcatctcacagagttgaactttacttttgattgagcagttttgaaaccctcttcttgtagaatctgcaagtggacatttggagctctttggggcctatggtggaaaaggaaatatcttcacataaaaactacacagaagcattctctgaaacttctttgtgatgtgtgcattcatctcacagagttgaacctttcttttcattgagcagttttgaaacactctttttgtagaatctgcaagtggacatttagtgcgctttgtggcctaaggtggaaaaggaaatatcttcacataaaaactagacagaatcattccgacaaacttctttgtgatgtgtgcattcatctcacagagttcaaacatgctttagattgagcagtttggaaacactctttttgtagaatctgcaagtggatatttttaacgcttggcagcctatggtggaaaaggaaatatcttcacataaaaactagacagaggcattttgagaagctcctttgtgatgtgtgcattcatctcacagtgttgaacattttttttttatttagctgctttcaaatattctttttgcagaatctgcaggtggatatttgaagctctttgaggcctatggtggaaaagggtctgcaagtggacatttggagagctttgaggcctaaggcagaaaacaaaatattttcctattataattagacagaagcattctgagaaagttctttgtgatatgtgcatgcatctcacagagttgaaactttcttttgattgagcagttttgacacactctttttgtagaatctccaagtggacatttggagcactttgtggactatggtggaaatggaaatttcttcacataaaaactgttcagaaacattctgagaaacttctttgtgatgtgtccattcatctgacagtgttgaatctttcttttgattgagcaacttggaaactctctttttgtagaatctgctagtggacaattggagtgctttgaggcctatgggggaaaacaatcttcacttaagtactagacagaataattctgagaaacttctttgtgatgggtgcattcatttcacagagttgaacctttcttttctttgagcatctttgaaaaactctttttgtagactctgcaagtggacatttggagctctttgtagcctatggtggaaaaggaaatgtcctcacataaaaactagacagaagcattctgacaaactcctttgtgatgtgtgaattcatctcacagagttgtaactttcttttgattgaacagttttgaaacaatcgttttgtagaatctgcaattggacatttggagcgatttgcagcctgtggtggaaaacgaaatatcttcatataaaaactagaaagaagaattctgagaaacttcttcatgatgtatgcattcatctcacagagtttaacataactttcaattgagcagttttgaaaccctctttttataggagcagcaagtggacatttggaggtctttgaggcctatggtggaaaaaaaaatcttctcattataactagacaaaagcattctgagaaacttctttgtgatgcgtgcattcatcacacagagttgaacttctccttagattgagcagctttgaaacactctgcaagtggacatttggagcgatttgaggcctatggtggaaaaggaattatcttcacataaatactatacagaaacattctcacaagcttctttgtgatgtgtgcattcaactcacagagttgaacctttcttttgactgagcaattttgaaacactctttttgtagaacccgcaagggacatttggtgtgctttgaggcatatggtggagaaggaaatatcttcacttaacaactaggcggaagcattctgagaaacttctttgtgttgtgtgcatttatcttacagagttgaaccatacttttgattgagcagctttgaaaaactcttttttagactctgcaagtgaacattttgagctctttctgtcctacggtggaaaaggaaataccttcacataaaaactagacagaagcattctgtgaaacttctttgtgatgtgtgcattcatctcacagagttgaacatttcttttcattgagcagttttgaaacactgtttttgtagaatctgcaatggacatttggagggctttgaagcctatggtggaaaaggaagtaacttcccataaaaactagacagaatctttcttagaaaattctttctgatgtgtgcattcatctcacatagttgaacatttcttttgattaagcagctttgaaacactctttttgtagaatctgtaaatggacatttggagtactttgagggtgatggtcaataacgaaatatattcacttaaaaactagacagaagcattctgtgaaactactttgtgatgtgtgcattcatctcatagagttgaacatttcttttgattgagcagctttgaaacactctttttgtagaatctgcaagtggatatttggagcactttgagacctatggtggaaaaggaaatatcttcacataaaaactatacagaaacattctgacaaatttctttgcgattggtgtattcatgtcacagaattgaaccttccttttaattgagcagttttgaaacactctttttgtagaatcggcaagtggatatttagagagctttgaggcctatgttggaaaaggaaatatctttacataaaaactagacagaggcattctgagaaacttgtttgtgatctgtgcattcgtctcacagagttgaacctttcttttgattcagaagtttggaaacactctttttgtagattctgcaagtgaacatttggagctctttgaggtctatggtcaaaaaggaaatatcttcacacaaaaaaaagacagaagcattctgtcaaactactttgtgatatgtgcattcatatcatggagttgaaccttccttttgattaagcatttttgaaacaccctttttgtactatctgcaagtggacatttggagtgctttgaggcatatggtggaaaaggaaatatcttcacataaaaactagacagaaacattctgacaactttctttgcgatgtgtgcattcatctcacagagctgaacctttcttttgattgaatagtttggaaactctctttttgttgatctgcaagtggacatttggagtgctttgaggcctatggtgaaaaggaaatatcttcacataaaaactagacagaagctttctgagcaacttctttgtgatgtgtgcattcatctcacagagttgaacatttctttgtattgagcaggtttgaatcactctttttgtagaatctgcaagtggacatttggagagctgtgtggcctatggtggaaaaagaaatatcttcccataaaaactagatataatcatcctgagaaaattctttgtgatgtatgtattcatcacagagagttgaacctttgttttcattgagcagttttgagacactctttttgcagaatctgcaagtggacatttggagcgctttgaggcctatggtggaaaaggaaacatcttcacataagcactagacagaagcattctgagaaacatctttgtgatgtgtgcattcatctcacagagttgaacatttcttttgattgagcagtttggaaacactctttttgtagaatctgtaaggggacatgcggagctctttgaggcctgaggtggaaaaggatatatcttcacaaaaaaaactaggtagaagcattctgacaaacctatttgtgatatgtgcattcatctcacagagttgaaccttacttttgattaagcagttctgaaaaacccttttggtgctatctgcaaatggacattttgtgtggtttgaggcctacagtggaaaaggaaatatgttcacataaaaattagacagaagcattctgacaaattactttgtgatgtatgcattcatctcacagagttgatcaattcttttgagtgagcagtttggaagctctccttttgtagcatctgcaagtggacattttgagtgctttgaggcctatggtggaaaaggaaatatcttcacataaatattagacagaagcattctgacaaattctttgtgatgtgtgcattcatctcagagagttgaacctttccttcgattgtgtagttttcaaacactctttctgtaacatctgcaagtggacatttggagtgatttgaggcctaaggtgaaaaatgaaatatcttcacataataactagacagaagcattctgagaaagttttttgtgatgtatgcattaatctcacagagttgaacctttcttttgattgagcagctttgaaacactctttttgtagaatctgcaagtggacatttggaacactttgaggcctatggtggaaaaggaaatatcttcatagagaaatttctttgtgatgtgggcattcatctcacagagttgaactttcttttgattgagcagttttgaaacactctttttgtagaatctgcaagtggatatttggagcactttgtggcatatggtggaaaaggaagtatcttcacttaaatagtagacagaagaattctgacaaacttctttgtgatgtgtgcattcatctcagggaattgaaacttacttttgattgagcagtcttgaaactctctttttgtagaatctgcaagttgatatttggagcacttttaggcctacggtggaaaaggaaatatcttcacataagagctagacagaagcatcctgagaaacttctttgtgatgttttcattcaacccacagagttgaatcttacttttggttgagcagtttggaaacactctttttgtagaatctgcaagtggacattttgttcgctttgaggcctatggtggaaaaggaaatatcttcacttaagatctatacagaagcattctgagaaacttcttcgtgatgtgtgcagtcatctcacagagttgaacatttcttttgattgagcacctttgaaacattatttttgtaggatctgcatgtggacctttggagcgccttgaggcctgtggtagaaaaggaaatatcttcacataaaacctatacagaagcattgaggccttcattggaatcgggtacatcttcacataaaaactagagagaagcattctcagaaacttctttgtgatgtgtacattcaactcacagagttgaacctttcttttgatagagcagttttgaaacactcttcttgtagaatctgcaactgcatatttggactgcttcgaggcattcgttggaaatgggatatcttcacataatcactagacagaagcattctcagaaacttctttgtgatgtgtgaattcaactcacagagttgaacctttcttttgatagggcaggtttgaaacactctttttgacgaatctgcaagtggacatttgaagctctttgagacctatggtggaaaaggaaatatcttcacataaaaactagacagaagcattctcagaaacttctttgtgatgtcagcattccactcacagagttggacacactttatcatagagcagttttgaaacactcttttagtagaatctgtgagtggatatttggaccactttgaggcttttgttggaaaagggaatatcttcacataatctctagagagaagttttctcagaaacttctttgtgctgtgtgcattcacctcacagaattgaacctttcttttgatagagcagttttgaaacactgtttttgtagaatctgcaagtggacatttggagagatttgagacctatggttgaaaaggaaatgtcctcacataaaatatagacagaatcattttcagaaacttctttgtgatgttcgcattcaactcacagagttgaagatactttatcatagagcagttttgacacactcttttagtagaatctgcaagtggatattcggaccgctttgaggcattcgttggaagtcggaatatcttcagataatcactagatagaagttttctcagaaactactttgtgatgtgtacattcatgtcacagagttgaacctttctttttatagagcagtttaagaaccccctttttgtagaatctgcatgtggatatttcaaccagtttgaggtcttcattggaaacgggtatatcttcacataaactctagacagaagcattctcagaaacttttttgtgatgtgtgcattcaactcacagagttgaacctttcttttgataaagcagtttagaaaccctctttttgtagaatctgcatgtggatatttggaccagtttgaggtcttcgttggaaacgggtatatcttcacataaactctagacagaagcattctcagaaacttttttatgatgtgtgcattcaactcacagtgttgaaactttcttttgatagagcagtttagaaaccctctttttgtagaatctgcatgtggatatttggaccagtttgaggtcttcattggaaacgggtatatcttcacataaactctagacagaagcattctcagaaacttttttgtgatgtgtgcattcaactcacagagttgaacgtttcttttgatacagcagctttgaaacactctttttgtagaatttgcaattggatatttggtctgctttgaggccttctttggaaatgggaatatcttcacataaacactagacagaagcattcccagaaacttctttttgaggtgtgcattcaactcacagagttgaacataccttatcatagagcagctttcaaacactctttttgtagaatctgagagcagatatttagagagctttgaggcctatggtggaaaaggtaatatctttatataaaaaccagacagaaaaattctcagaaacttctttgtgatgtgtgcattcaactcacagagttgataatttcttttgatagagcaggtttgaaacactctttttgcagaatctccaagtggacatttggagcgccttggggcctatggtagaaaaggaattatattcacataaaaactagacagaagcattctcagaaacttctttgtgatgtttgccttcaactcacagagttgaacataccttatcatagagcagttttgaaacactcttttagtaaaatctggaagtggatattttgaacgctttcaggccttcattggaaatgggaatatcttcacataaaaattagacagcagcattctcaaaaacttctttgtgatgcgtacattcaactaacagagttaaacctttcttttgatagagctgattttaaacactctttttgtggaatctgcaaatggacatttggaccgctttgaggccttcgttggaaacgggaatatcttcacataaacaccagacagaagcattctcagaaacttctttgtgctgtgtgcattcaactcacagagttgaacctttcttttgatagagtaggttgaaacactcttgttgcagaatctgcaagtggacatttggagtgccttgaggcctatggtggaaaggggagtatcttcacataaaaactagacagaagcattctcagaaacttctttgtgatgtttgctttcaactcacagatttggacatactgtatcatagagcagttttgagacactcttttcacaggatctgcaagtggatatttggactgcttaccagccttcgctggaaacaggaatatcttcacgtaatcactagacagaagctttctcagaaacttctttgtgctgtgtgcattcaactcacagatttgaagctttctttagatagagcaggtttgaaacactctttttgtataatctgcaagtggacatttggagggctttaagccctacggtggaaaaggaaatatcttccaataaaaactagagagaataattctcagaaacatcttgtgatgtttgccttcaactgacagagttgaacataccttatcatagagcagttttgaaaccatcattttgtagaatcttcaagtggaaatttggagagctttgaggcctaaggtgggaaaggaaatatcttcacataaaaactaggcagaagcattctcagaggcttctttttgatgtttgtattcaactgacagagttgaaccttttttttgatagagcagttttgaaacactctttctgtagaatctgcatgtggatatttgaagcgctttgaggacttcattggaaactggaatatcgtcacataaacactagacagaattattctcagaaacttctttgtgatgtgtgcattcaactcacagagttgaacctttcttttgatagagaaggtttgaaacactctttttgcagaatctgcaagtggacatttggagcgccttgaggcctatggtggaaaaggaaacatcttcagataaaaactagacagaagcattctcagaaacttctttgtgatgtttgcattcaactcacagagttggacatactttatcatagagcagttttgatacactcttttagtagaatctacaagtggatattttgaccatttagtggccttcgttggaaatgggaatatccttatataaaaattaggtagaagcattctcagaaacttctttgtgttgtgtgcattcaactcacagtgttgaacctttcttttgacagagcaggtttgaaacactgttt

SEQ ID NO: 2682 - DNA, 154 bp, Homo sapiens
  source 1..154: mol_type = other DNA
cccctcatccgcccccgccatccaggtacctagcgcattctggtgcagaggtttaaggaccccttgaggggtcgccggtctgcctgtgggtcaggtgcagtgggcccacagtggagtccgttcaggaggggcccgcccctccctcgcctcccct

SEQ ID NO: 2683 - DNA, 301 bp, Homo sapiens
  source 1..301: mol_type = other DNA
gccgggagcggtggcttactcctgtaatcccagcactttgggaggccgaggcgggcggatcacgacggtcaggagatcgagaccatcctggctaccacagtgaaaccccgtctctactcaaaataccaaaaattagccaggcgccgtggcgggtgccagtagtccccgctacttgggaggctgagacaggaggatggcgtgaacccgggaggcagagcttgcagtgagccgacatcatgccactgcactccagtctgggcaacacagtgagactccatctcaaaaaaaaaataataataaa

SEQ ID NO: 2684 - DNA, 291 bp, Homo sapiens
  source 1..291: mol_type = other DNA
gccaggctcagtggctcatgcctctaatcccagcactttgggaggccgaggtgggtggatcacgtcaggtcagtagttcaagaccagcctgacgaccttggtgaaaccccatgactactaaaaacaaaaaatcagcggggcgtggtggctcatgcctataatcgcagctaattgggaggctgaggaaggagaatcgcttgaacccaggaggcaaaggttgcagtgagctgagatagtgccattgcactccagcctgggcaacaagatcaaaactctgtccaaataaaaaaa

SEQ ID NO: 2685 - DNA, 1059 bp, Homo sapiens
  source 1..1059: mol_type = other DNA
ctagggaatgataaactatttgcaaatcatgtatgtgtaaaagtcttgtatagagaacatataaaaactctcaaaactcaataggaaaacaatccaattttttaagctaaaagatttaaacaagcacttcactgaaaaagatatacgtatgacaaaggggcacatgcaaagataatcaacatcattagtcattagggaaatataaatcaagaccacagtgaaatataactacacatctattagaacagctaaaaaaaaaatagcaacaatgtcaaactctgacaagaatgtaaagagactggaagtctcacaaatttctgttgggaatgtaaagtagtagagccactccagaaaacagtttgacagttccttaaaaaattaaacatatccttaccatacaaccccataacttcaatcctggacatgtactccagagaaatgaaaacttacatacacgaacaaatgcacacaaacctgtacatgaatgttcatagtagctttattcataacggcaaaaaactggaaacaaccaaaatgttccctaataggtaaatgttaaacaaatcgtggtacatccataccgtggaatactactcagcaataaaaaggaatggactattgatacacacacaacttagagggatcttaagataattatgctaagtgaaaaatgtgaatctattttatggttctagttgtataacattcttgaaatgaccaaattatagagatggaaagcagattagttgtttctagatatcaggaatggtggaagggaggggactgggtgtgactatcaagatgtagcaagaaggagggctttgcagtgatggaatagttatttatcttgattgtggtagtagctatatccgtctacaagtgataacatacaactacacatattcatggtatcaatataattccctggttttgatgttgtattttaattaaggacagtataatcattgggtgaaactgggtgaagggtacgtgggacctctttctactatcttttcaatttcatatgaatctgtgattattttaaaataaaatgtttaa

SEQ ID NO: 2686 - DNA, 236 bp, Homo sapiens
  source 1..236: mol_type = other DNA
tccttagatgtctaagtgctaaaactgcagggccctgtttctgagctcagagacagcagagccagctgaacactggcctctccttagaggtctgagtttcaggtgagcatgaccttcctccaagcttctaagttttagtaattcctgtctcttcactttgtttcctcagacctcaggtggttgctgcttgctgcagttgctacttcctgcagttgctacttccatcatatattaga

SEQ ID NO: 2687 - DNA, 525 bp, Homo sapiens
  source 1..525: mol_type = other DNA
ggtgccacctgcctcgctgctgggctccttcctgcccctgcgcctgcgcgggcgctgggcctttgcgaaggctgagctgagttctcctcagcacagacccggagagcatcgcgagggcggagctgagttctcctctgcacagacttcggagatacagcgaaggcggagcagtgttctcagcacagacccgggcgggcgggccgggggcaccgcgagggcggagctgcgttctgctcagcacagaccttgggggcactgcctcgctttggtacaactcggggccgcatcgacggtgaatagaatccttcctgtttgcagccctgaataatcagggtcagagaccagttagaggggttcaatgtggaaaacgggaaaccaaaatcccctctgaatcctgcccaccgaggttctccccagccaaggcgaggcggccgcagtgcgagatccacaccgcagcctcggaagacaaatgcagcattcctaatgcagacatgacacccaaaatatgacacctccattgctcat

SEQ ID NO: 2688 - DNA, 1679 bp, Homo sapiens
  source 1..1679: mol_type = other DNA
gacataaatgacctgatggagctgaaaaaacacagctcgagaacttcatgaagcatacacaagtctcaatagccaaagtgaccaagcggaagaaaggatatcagagtttgaagaccaccttgctgaaataaagcatgcagacaagattagagaaaaaagaatgaaaaagaatgaacaaagcctccaagaaatatgggactatgtaaaaagaccgaacctactattgattggagtacctgaaggagatcgagcaaatggaaatgagctggaaaacactcttcaggctgggactacacagccaaggttttatatacaggagaacttccccaacctagcaagacaggccaacatgcaaattcaggaaatacagagaacaccactaagatactcctcgagaagatcacccccaagacacataatcatcagattctccaaggtcaaaataaagaaaaaaatattaagggcagccagagagaaaggtcaggttacctacaatagtttcatcagactaacagcagatctctctgcagaaaccctacaagccagaagagagtgggggccaatattcaacatttttaaagaacataatttttaacccagaatttcatatccagccaaactaaccttcataagcaaaggagaaataaaatcctttccagacaagcaaatgctgagggatttcgtcatcactaggcctgccttacaagagctcctgaaggaagcactaaatatggaaagtcaaaaccagtaccagccactgcaaaaacacaccaaaatacagaaaccaatgacactatgaagaaattgcatcaattagcatgcaaaataaccagatagcatcatgatgacaggatctaatccacacataacaatactaaccttaaatgtaaatggactaaatgccccaattgaaagacacagcctggcaaattggatagagtcaagacccagtggtgtgctgtatttgggagatgcagctcacatgcaaagacacacataggctcaaaataaagggatggaggaaaatttaccaagcaaatggaaagaaaaaaaaaaggcatgggctgctatcctagtctctgacaaaacagacttcaaaccaacaaagatccaaaaagacaaagaagggcattacataatggtaaggggatcaattcaacaagaagagctaactatcttaaatatatatgcatccaatacaggagtacccagattcataagacaagtttttagagacctacaaagagacttagactcccacacaataatagtgggagactttaacacccaactgtcaacgttagatgaacgagacagaaaattaacaaggatattcgggacttgaacacagttctggatcaagcagacctaatagacatctacagaactcttcaccccaaatcaacagaatatacattcttttcagtgtcacatggcacttattctaaaattgaccacataattggaagtaaaacactcctcagcaaatgcaaaagaacaaatcataacaaacagtctctcagatcacagtgcaatcgaattagaacccagaattaagaagctccctcaaaaccacacaactacatggaaaatgaacagcctgctcctgaatgactcctgggtaaataatgaaattaaggcagaaatcaagaagttctgtggccaaaaacatatgaaaa

SEQ ID NO: 2689 - DNA, 782 bp, Homo sapiens
  source 1..782: mol_type = other DNA
aaaaaaatacagaaagaaacagaaaggaaagaacagtgattgaaaaaagtaagaacagaatgaaatggaaataagaaatttaaagggattagaaagaaaatgataggtaaggaagattagcaaaagacataaaagaatatttaaaggtgtaactcaatacattttccagaaataaaagaagacttgaatacattgtacttgactacatcttgaaagtcacagagtatcctggaaaaaagtgacaaccataatctagtacatttatgagactccaaagataaagaaagaatatttgggcaggcagtcactccttccttatgatggggaaaaatgagattggcctcagactttaccattgtatcatttaccattagaagatagtggagtgatacctttggtactagtcctccaaaaaacagtgtgactcaaaaattttatacccagcaaaaactatcattcattataaaagaaatgaaccatatttgaacttacaacaattcaagacattttgttatgtcttgaagaaactattaggggaagaagttttcagccacccaagagttgaatggaaaacaacagcaaaggcctagtgaagaagactgaatctatttaaatgtaggactaagactaaagcaagttgggatttatgattaaaaacaggtaaatattataaaccctgaaaatgtagatctaatataactaacagaaggggaaggaagaagctactgtattatcttctatagctaagaagtcaaaagatatcattagaaactggtaaataa

SEQ ID NO: 2690 - DNA, 291 bp, Homo sapiens
  source 1..291: mol_type = other DNA
cccagaccccaaaagttctgaaaatgggatatttactataacttacttggtggcaaaacctggaccaacctgatatgaggctatttatggtattcatcctcctgagtgtgaaaatccatgcctttgctgcagaaatatgtgtgtgtaatgacaggacacttccccagaccttattggagatgtttttagcatgcggtagatgcactgtatcaccttactaaaatctgggaaattttgaattcctacagatatttgaccccaaaagttttagccataaggattgcagacctg

SEQ ID NO: 2691 - DNA, 1231 bp, Homo sapiens
  source 1..1231: mol_type = other DNA
ggggccacaatgaccaaatagaaacagctaagcagctctagtctgctgctcccagcaagaccaacacagaaggcaggtgatttctgcattccgaactaaggtacccatttcatcccattgggactggttaggcagtgggtgtgatctatggagagcaagcagaagcagggtgaggcgtcacttcatctgggaagtgcaaggagcccggtgacctccctcccgcagccaagggaagccgtgagagactgtcccacctacccgggtactatacttttctcatggatttttgcaatccacagatcagtagattcccttgtgcatctacaccaccagggccctgggtttcaagcacaaaaatagaccactgtttgggcaggcactgagctgcagaagtctttcatactccggcagtgcctggaactcccgtgagacaggaaaaccatccacacccctggaaagggggctgaagccagggagccaagtggtctcgctcagcaagtcccactcccacagagcccagtgagctaagaaccactggcttgaaattcccgctgccagcacaacagtctggagtcggactgggatggtcaagtttggtcgggggagaggcgacctccattactgtggctctagtaggtggtttccccctgatagtgctaaggagattgagaggtttggactgagcagaattcaccacagcacagcgaagcagctgtggccagaatgtttctctagattcttcctcacggggcagggcatctctgcagcaaatccagcagctccagtcaggggcttacagacagaattctcatctccctgggacagagcacccggggggagggatgggtgctgtcacagcttcaaaggacttaatctttcctgcctgctggctctgaaaagagcagctgatcctgacaagggggattctcccagcacagcacattagctctgctaaggaacagatgcctcctcaagtggattcctgaccccatgcctcctgactgggaaagacctcccaaaaggggctgacagacacctcatacaggagagctctggctggcatcaagccagtgactctctgggacgaagcttccacaggaaggagcaggtggcaatctttgcttttctgtagcctccactggtgacacccaggtgaacagggtctggagaggatacccagcaaactgaagcagatctgcagaagaggggccttgcctgttggaagaaaaac

SEQ ID NO: 2692 - DNA, 407 bp, Homo sapiens
  source 1..407: mol_type = other DNA
tgttagggacaagctgccccaggaccacccccaccccaccaccaccaccactcagtgcagctgacccttaccctgaatactctgcagctgcatccctgaacccttatctaggtgccacagcaaggtcaccagacttgccgagtgaaccctgattacagcccccccgggcggcatgggggaggtcacgagaaacgcggataaacctaagttacatcctcttgtaaattcatgttttcacaagatactatattgtaagccagtcacgagaagatatgtggtaaagttaaccgacaaccctagggtctctctcccccatataaacccctcattttttaagctcagggctgcctcctctgactgcggtggagcagcctggcaggttaataaacttacttgcctgaccttgg

SEQ ID NO: 2693 - DNA, 131 bp, Homo sapiens
  source 1..131: mol_type = other DNA
attttaatgtttctttactgatcaccctcactagaatttatgttcaatggcaacactgatcttatcttgttcacaatttcttcacatcaggcacatagcaggtactcagtaaatacatgtaaatcaaagaa

SEQ ID NO: 2694 - DNA, 259 bp, Homo sapiens
  source 1..259: mol_type = other DNA
tattttttacctgtgaaataacagtgactttttaaaatggtgacagtgttggcaaggaaacagcaacacaggctgcgctgttggtaggagtgaaaaccagtataattcttctgaaaaacatttatcagaaacttaaaatatttcataccgtttgatccagtagcttcttctaaatcataaatgcagacaatgtttaggtaaagacatactcattaagtgttatttattttactcaagaactggaaaccaactaaatgcc

SEQ ID NO: 2695 - DNA, 65 bp, Homo sapiens
  source 1..65: mol_type = other DNA
gccacttaactccagtgtggatgacagagcgagaccctgcctcaaaaaaaaaaaaaaaaaaagaa

SEQ ID NO: 2696 - DNA, 5366 bp, Homo sapiens
  source 1..5366: mol_type = other DNA
atcaagatgacttactagatgcaggtagaatgtgcctcctccacggaggagaatgcgaatagtaagtagatgctcacattttgaagagattgtctaggagagaataatatgatacaccagagaagtgatgggaagcaccagaagtaaggagaggatttgtggcagtttgcctggccagagactggctgacagtcaggcgatcctcctggatgtggggaaacagtaagagagaaactcccagagctccacattttgaaatgggcttttatgatcttcgctataggagacaccctagactcactgggggctcaggcttgatatatggagatacctaaagattgcacagagatgttgctgcaaaaagagaacccatatggaatcccacagtcatttgatcctagagcagcttgagctgagtgctattttgaaagcctagataccagggatctacagacatggcggctgctgctacactgctccaaggagggagaagggagacatggcactcctctgcaatcctgggagggtccttactgccctactatggactgcttttgagactgaaatgtgagtgggctgctctcccgacagcttcttgcccacactgcttgcctgggaaggacaagcaaggcgccattttgagagtttaattatgagttgagtttgggctgaaggggctgcagtcactgatcagccaaggtaggacagggaaaccatgctctcttacacatatctagggcagtactcactgccccacagtggtctgctgtgagactgagatatgagtagaaagcaccacccacggcttcttgcctatgctgtttgcctggaaggggccctatcttatctggtcccaggaccaaagtgcaatattgggaatttaatgctaggttgttcccttccctcaggctaagtttgaaatgacacagttgcagctcccacccagctgtgagagggacatggagaccaagctctcctcagcacacttaggacaataccagcagccctgggactggagctgtgggactggagagtagcccgcccaagacatcacagataccagcaaaaccaacatggactgcttgggtctcagtgggttgctccaccactgctactgccatcacccacaacacactagctgctcagggacttgagaattcacccacacacccagcccaccactcccactgctagcttccaaacatgccatctggtgacccaagaattagacctctaggacccactaacacttgaaacagtgtaagctgctctgaggtctaaaaacaggcacactcagccaaatgctgccaccattggagccttaagactacttcatttggcatccaagtcctcagaaaaacttcaccactacctcaactaataaatataccctaagccactgagaaaatcacagacactactgacctatgtgtattgctaaagaagccatacaaagattatgctaccacaggcacccaaaatcaaagccaacagatcctacttaaccaacaacatacatacatcttcaggagaaaaaattttcccctacaaagcaatatcaaaaaataggaacaaatgactgctacaccagatgtgcagatgtcaacacaaggacacaggaaatgtgtaaaagcagggaagtgtggcaccaccaaaggaccacaacaatggtccagcaactgattctaataaaaaataatttattgaaacaccatatcaagaagtcaaagtattgatctttaaagacgctcaatgtgatataagaaaaatctgaaaaccaatacaaagaaatcagaaaatcaattcaggatatgaatgaaaagtttaccaaggagataagaaagctttaaaaattatgggactaaaatatcactgaaggaattgcaaaatacatttgaaagcttcaatgatggactagatcaagcagaaaacaaaatttcataacttgaagatgtgtccttttaaataatccgtcagataaaaataaggaaaaaaggataaaatagaatgaatgaagccttcaagacaccagaaaccacataaagtgactggacttaggaattattggtattcccggcagcaagagagattaaaaagtttagaaaagctatttaagggaataatcaataatatcttcccaactctagcaagagatttagacattcagatataggagacccggtgacccccaggcaaagacattgcaaaaatgacttcaccaaacatattatagtcagaatgtcaaaagttaaagtgaaagaagtaatattaaaattagcaagagaaaagtatctagtcacctatacaggaaatcccattagactaacagtaaacttttcagcagaaaccttacaggtgattagagaatgggatggcatattcaaagtgctgaaagaaaaacactaaaggaaatacagtgtttttctgtatatttctctataaacataccctgcctgaagctgcaaaaatgaagaagaaataaagtcttctcatacaagtaaatgctgacagaatttgtaaccactagactgaacctacaggaaatgttcaaaaggatcttaaacatgtaaatgaaaggtcaaaattcaccatcacaaaaacatgtgaaaatataaaactcgcaggttttataaaacaatctcacaaaagaggaagaaaaatgaatcaaatggcaacatgacagaatctcatcaaatcataaataccaaaataaaacaaagagaaaaggaaggaaacaaagaaatgataaaacaccttgaaaacaataatatgacagtaacaaaggctcatatatcaatattaaccttgtatgtcaatggtttaatgctacacttgaaagatactcataaagacacatatagactggacataaagaaaaggatcttccacacaaatggaaaccaaaagcaagcaggagtagcaatatttatgtcagctaaaacagacttttaaaatcaaacacagttaaaaaaaaggtgattatgtaatgataaagggatcaatttattaaaaggatacaacaactctaaatatatatgcacccaacactggagtccccagattcacaaaacaaataatactagactttaaaaaagagatagacagcaatacaataataggtagggactccaacaccctacccatagcactagacagatcattgagaaagagatttaacataaacattggatttaaattggattttagatagaatggacttaaacatttacagaacagtctatgcaccaactatagaatattcatcgttttcgttagcacgtggaacattctccaaaatagactagagtttaggccacaaaaaatttttaaaaatttgtaaaaattgaaatcacatcaagtgatttcaccttccagaccacagtggattaaaactagatgtcagttctaagtggaaacttattaactatacaaatacatggaaattaaacatcatgctcttgaatgataactgggtcaactaagaaattaagacagaaattttttaaaaattttggaacaaatgaaaatgaaaacacaacatactaaaacctagtgctaagtttatagcaataaatgcatacatcaataaagtagaaaaatcacaaaatagcaagctaatgttgcacctcaattaactggaaaaaacaagaacgaaccaaatccaaagttagctaaggaaaataaatgacaaacgtcagaggagaattaaagagaggcacccccaaaatagaaatgatcaacaaaataagaagttggttctttgaaaagagaagcaaaaataataaaccactagctagactaaccaagaagagagaagatgtaaataaacagcaatgaaaaaggagatattacaactgataccatagaaattaaaaatatcatgagagactgctatgaacatctgtatgctcacaaactagaaaagatagaggaaataaattcctggaaaactgcaagctcctgagattgaaccaagaagaacccctgagcagatcaataatgagtagtgggattgaataagtaataaaaaaaaatcctccccttaacccctaaaaaacgccaggaccagttggatgcacagccaaattctaccaaacatacaaaaatgaaccaataccagtaatcctgaaaccattccaaaaaattaaggagggagttctccctaactcattttatgaagcaagtatcaccctgatatgaaacccaaacaaagatataacaaaataagaaaatcatagaccaatatctccgatgaacataggcacaaaagtcctcaacaatgtgctagtaacttgaatccaataacacaatgaaaagatactgtaccataatcaggtgggatttatcttagagatgcaaggatgattcaatatatataaattaataaatttgatacatcacatgaacagaaacatgttaatctgttcaaaatcacatgaaaaaaactatatgatcatctgaatagatgcagaaaaagcatttgataaaattcagtatcttttcataataaaaatcttcaaattagggacagaagaaacataactcaacataaaggccatatatgacaaacccacagccaacatcatactaagtggggaaaaggtgaaagcattccctgtcagaattgaaacatgacaagaatgcccacttttatcagtcttgtgcaagatagtactggaaattctcaccagggcaattgggcaagagaaaaaaaataaaaatatcaaaattggaaaagggaaagtcaaattatctctgttcacttatggtgtgatcttatatctagaaaaacctaaagactccaccaaaaaaaatcttagatgtgataagtgaatacagtaagatttcaggatagaaaagtcaatgtatagaaatcaggaacatttctatatactaataatgatctagccaaggaccaaatcaagaaggcaatctcatttacaatattaaaaaattaccttgtaatatatataactaaagatataaaagatctctacaaagacaactacaaaaccctgaagaaagaaagagtagatgacacaaagaagtggaataacatcccgtggtcatggattggaagaattaatattgttaaaataaccatattgctcaaagcaatctacaggttcaatgtaatctttatcaaactaccaatgtcatttttcacagatttagaaaaaacaattctaaaatacatttggaaccaataaaaagcccaaatagccaaacaaccctaatcaaaatgaacaaagctagaagcattacattgtctgacttcagataatactaaaatgccatagtaactgaaagaacatgttactggtataaaaatagacacatatatcaatggaatagaatagagaact

SEQ ID NO: 2697 - DNA, 1942 bp, Homo sapiens
  source 1..1942: mol_type = other DNA
aggatgcccactgttattcttctattaaatacagtactgaaagtcctagccagagcaattagaaaagaaaataaataaaagacattcaaattggaaatcagtaaaattatatggcatggtcttaaatgtagagaattctgaagactcaaaaaaagtaatattcaataagaaaattgagaaaagaatcccatttataatagcattaaaaataatataatacttaggaataaacttaatcaatgaggcaaagcagaaaacattgctgcaaaaaattaaaaaataatggaaagacctcctatgttcatggatcagaagacttgatactgtgaaaatgtccatactattcaaagtgatctacagattcagtggaattcctctcaaaatcctaatggcattttttacagaaatagaaaaaaaaaattctaaaattcatatggaaccccagtggatcccaaagagcctaaatcaccttggggaagatggacaaagatggagtactttcatttcctctttttaaaacacattaattacagagctacagaaatcaaagctgtgtagtactgctatgaaggcagccattacttcaatggaacagaacacagagcccagaaataaacccacacatactcaaatgatctttgacaagagtgcccaaactggacaatgaggaaagggtagcctcttcaacaaatgatgttgagtaactgggtatccacatgcaaaaaaaaaaaaaaatattgtgctctgttttacactacacaaaaatcaactccaaatggatgaaagacttaaatgtaagctctgaaatgtaaaatttaaagaaaagaatgtagggcaaaagggttataacattgatattcatgattttttgaatataataccaaaagcacaggcaacaaaagcaaaaatagacaagtgagattacatcaaactaaaaatctgcttttcaaccaaggaaacaatcaacagagtgaaacctaaacagtgggagaaaatatttgaaaaccatatatctgataaagggttaatgtccaaaatatataagaaactcatacaactcaatagcaaacaacaactaaaaacctgattttaaaaaatgggcaaaggacttgcataggcatttcttcatctttgtccagtgaagacatacaaatgactaatagagttatgaaaagatgtacaatatcattcatcatcaagaaaatacaaatcaaaaccacaatgatgtattacctcatagctataaggaaggccattgtcaataaaatgacagcaaataaaactttaaaatgatgtgctggcaaggatgtagagaaattgagagccttgtgtgctgttggtagatatgtaaactctctcagctcctatctaaaacagtatggagatttgtaaaaaaaaaaaaaaaaaaatagaactaccatatgatgcagcaatacttctttgggtacttcttcaaaagaatttaaatcaggatcttcaagagatatttgcactcccatgttcactgcagcataaccaagaggtggaaataacttaaatgtccctcgatggtgaacatagaaagaaaatgtggtttatacatatgatgcaatattaatcagctaaaaagaaagaaattctgtcatagatgcacctaaaggatgttatgctaagtgaaagaatgttaagccagtcacagaagaaaaatttttgcatgattctacttatatggggtatctaatgctgttgtctcattgaaacagaaagtagaaaggtggttgccaggggatgggaggacagagaaataggaagttgctattgagtggatacagaaataatcatgccagaagaaacagttttagagatctgctgtacaacattgtgattatagttcacaaacctggactatacatttaacaatttgttaaaacaataggtctcatgagtttttttaaccacaata

SEQ ID NO: 2698 - DNA, 2080 bp, Homo sapiens
  source 1..2080: mol_type = other DNA
agcaaatattattagagctagagagagagataatagcttgtgacttcaccccactttcagcattggacagatagatttttccagagagaaaatcagcaaagaaacattgggtgtaatctgcactgtagaccaaatggacctaatagatatttacaaagcattttatccaatgactgcagaatacacattctttacctcagcacatggatcattctcaagaatagaccatatgttaggccacacaacaagtcataaaacattccaaaaaataaaaataaaataatagcaagcattttctctgatcacagtggaatataactagaggaataataggaattttggaaactatacaaacacatggaagttaaacagtatgctcctgaatgacaagtagatcaatgaaaaaagaaaaaaactgaaaaatttcttgaaacaaatgacaatgaaagcacaacatactaaaatctatgggatacactgaaagcagtactaaaaaagaagtttatggctatggtgcctaaatcaggacagaagaaaaactccaaataaataatgaggcatcttaaaaaactagaaaagccagagcaaactaaactgaaaataaatagaagaaaagaaataataaagatcagagtagaaataaatgaaattgaaataaaacaatataaagaatcaaacaaaaagttggtttattggaaaaataaacaaaactgacaaagctttagccagactaagaaaaaaagagacaaaacctaaataaataaattaaaagatgaaaaaagaggcattacaactgacaccacagaaactaaaaggatccttagtgggcactatgatcaactttatgccaacaaattggagaaatctagaaaaaatgcagaaattcctagacacgtgcaacataccaagattgagccatgagaaactccaaaaccagaacattttattacggctttagtgttgttgcttgctattgaacagaccagtaacaagtaataacattaaacccacaataaaaagttttccagcaaagaaaagcctgggacccagtggcatcattgctgaattctaccaaacatttaaagcaaaaccagtagcaactctactcaaactaatcaaaaaaaaaaaaaaaagaaaaaaaaaaaaaagaaaaaagcagaggagagaatacttacttccaaactcattctaggaggccagtgttaccctgataccaaaagcagacaaagacacattaaagagaaaactacagaccaatatttctgatgaatattcatgcaaaaatcctcaacaaaatcctaacaaatctaattcaacaacacattacaaagataattcatcatggccaagtgggtttatcccaaggatacaagggtgattcaacatttgtaaattaatcggtgtgataatcatgtcaacagaatgaaggacaaacaccatatgattatttcaattaatgttgaaacagcatttgataaaattcaacatcccttcatgataacaatcctcccacatagctataacaatcatccaagcaaaagaaataaggggcatccacagttgaatggaagaagtcaaattatctttgtttgcagatgatatgatcttatatttggaaagacctaaggaccaccgaaaaactgttagaactgttaaattcagtaaagttgcaggatacaaaatcaacatacaaaaatcagtaacatttctatatgccaacaatgaataatttgaaaaagaaatcaagaaattaatccctttataatagctgcaaataaaataactagaattagtttaaccagagaaatgaaagcttgtacaatgaaaactatcaaatatcattctagaaactgaagaggacaccaaaaagtgggaagatattccatgtcatggatttgaagaaacaatattgttaaaatgtccatactacccaaagcaatctacagattcaatcaattcccagcaaaataccaatgacattcttcacagaaatcaaaaaaaaatcctaaaatgtatatggaatcacaaaagactcaaaatagctaaagctttactgagcaaatgctaaggacagaactgg

SEQ ID NO: 2699 - DNA, 908 bp, Homo sapiens
  source 1..908: mol_type = other DNA
cttgaatgtgaaattcagactatcagaactgaaatgaaatattttttgggaaaaaaaggaaattgtgatataaacgttgactggattcagaaggaaactaacaaaagaaatctcaagagatgaagagtaaatccaaagttcccaaaggaggacagatttgacttaaataataataaagagcatttagcaacacaatagacacaacaaagagagcaaaaagcatatgaaagagagctacaaaatggttcaacatatgtaaaattggtttccttaaagaaaacaaaagatagaattaatatttaaaatcataatctaaaaaatatttctggaaaaacagaaagccctaatttaacatttttaaaaacattcagttttaagtagtttactatgtaacatgaaaaaatgatccagaaaggccatctcaggtcatatcccaataaaacaattatattgtaaaaataaagaaaaaaaatctgtgctacttggcaaaataagcaaatcatttacaaaaaaaatggatatcatctatcatgttggtatcatacttctcaacaggaacatacaaagcaagatactacttaaattaattaattaaaacatttaaaaaatttaaagaatgaatgagcaaagtccttattatccaaccaatgtttcctttaagtatcaaggctacacgaaaacacatttaagcgtgcaagaattcagggaatactgaagttcaagtccttcctgaggaatctgctagaaaaaatgttttatatgttcaatagaccattgggaagaacttagcaaatgaataatggtgagtgtttattgtattaatttcagatttatgaccaaagcaaaggtggggacaaatggaaagaatggcacataaatatgctattacatgttttgacaggatagaa

SEQ ID NO: 2700 - DNA, 209 bp, Homo sapiens
  source 1..209: mol_type = other DNA
agttctcaactgggagcaattttgcctcccatggaacattttggcaatgcccaaagatatctatatttgtcacaactgagggggagggtttactagtgacaggtactgagtacaggccagggatgctacaaatcatgccacactgcacaggaaacccctaaaaacaaaacactgactacaaatgttaatcatttggagattaagaaatc

SEQ ID NO: 2701 - DNA, 300 bp, Homo sapiens
  source 1..300: mol_type = other DNA
gccaggcacagtggctcacgtctgtaatcccagcactttgggaggccgaggcgggcggatcacgaggtcaggcgatcgagaccatcctggctaacacggtgaaaccccgtctctactaaaatacaaaaaattagccgggcgtggtggcgggcgcctgtagtcccagctactcgggaggctgaggcagaagaatggcgatagcccgggagtcggagcttgcagtgagccgagatcgtgccactgcactccagcctgggcaacagcgcgagactccatctcaaaaaaaaaaaaaaaaaaaaa

SEQ ID NO: 2702 - DNA, 756 bp, Homo sapiens
  source 1..756: mol_type = other DNA
accttgggatgttctttgactcctccttttctttcacaccatacatctaatctcagaaaattgtgtgggccttatctgccgtttctgctcagaaactgaccacttcttatcaccttcaatgctattactcactccatgtcactattgtcactccttgcttactgtaggagactccaactagagtccaccacactctattgcttcccacttctatccttccccattgcagtctatctcaatccagcatccagagtgatgctgtagaaacacaactcagattttggtgccctcctgctcaaaactctccaatgacttcaaacttaccagagtaaaaacagggtccttgtatttgcaaagaacgctttccaacatctgacccaggatgaccattgacttccacctgatcctcttctggattactctgccccagccacattcccatctcaggacctcttcccaagtcactccctctccctggaatgtgcttctccaaatcttgagcaagcttttcaaatccttgctcagatgtcaccttttcagtgaggtattatttgaccactgaatttaaaattacaatttccctcatggctacaatttctaattacttccccctgttttattttttccattgccatgaactctgtctaaaatataatgccatttatttattatatttagtacctgtctcatcacattagaatgtaatctccaagaaagaaaatatttgtgttggtatggctcactgaagtatcccca

SEQ ID NO: 2703 - DNA, 309 bp, Homo sapiens
  source 1..309: mol_type = other DNA
ggctgggcgcagtggctcatgcttgtaatcctagcactttgggaggccaaggtgagtggattacctgaggtcaggacttcgagatcagcctgggcaacatggtgaaaccacgtctcttctaaaaatacaaaaattagctgggcatgttggtgcatgcctgtaatctcagctactcaggatgctgaggcaggagaatcatgtgaacacctgggaggcggaggttgcagtgagccaagatagcaccactgcactccaacctgggcgacacagtgagacttcacctcagaaaaaataaaaaaataaaaaaaa

SEQ ID NO: 2704 - DNA, 352 bp, Homo sapiens
  source 1..352: mol_type = other DNA
ctgtggtctgaatctttgtgtcttcccaaaattcatatgttgaaatcctaacgccccaggtgatgatattagaagatggggcctttcaggagttgactaaaacttcagggaaaagccctcacaaatgggattagttcccttataaaataggtccaaggaaacttgctcacttctaacaccatgtgaggacacagtgagaaggcaccatctataagccagaaagcagtccctcaccagacatagatctgctggcaccttgatcttggacttctcaccctccagaactgggagaaataagtgtatattgtttataagctacacagtttatgatattatagcagcccaaacagac

SEQ ID NO: 2705 - DNA, 488 bp, Homo sapiens
  source 1..488: mol_type = other DNA
taacctttgattcagtaattctatttccaggtccttgtcttaaataattagagaggtgcacaaatatgtgtgttcaaggatatttattgcaacaatatttatgaaaatgacctgaaattccaacaatagagacaggcttaaataatgcataaaacattcatatcatagaatattttacagctgtttaaaatcatgtttttgtagaataatcaatgatttcagaaaatgtttataaagttcaagatttaaaaagtataatacaaaactgtacatagagcaggattccaaaatttcaaatgcaaatacatataggtacatatatacatataccacaaatagaaaaatgactgaaagaaaaaaatatgaaaatgttaacgcttgttatttctatgcagtgggattatgagaggtttcattttctcgtttaaagtttcctatattttccaattttccctaaattatgtattgctttcacatttagaaaaata

SEQ ID NO: 2706 - DNA, 995 bp, Homo sapiens
  source 1..995: mol_type = other DNA
acagactgtgggaaaagaatctacctgctttacagttgcatgacatggtcacttaagagagtggggacagaaagacatggacctgggtagctttggaaaatggtgttttgactataatctataaaaactacaaaaagaactgcataaacgctgtactctagtgggtaaagtttctcatgggacacaggttgacagttccaacgctgctttatatatgtacaagggttaaacaaatagtgaaggggtggtggatggagagagccaagtttcccacagctggagaggaaagtcaaaggtatgcaaggaaggaaagctagaacgaaccttgtgggactgtattaaagtcagaaacctcaatgtgaacttaggtttagcttgacatagatacagaaataattatattttagtgtgtattcatggattaggacacacatgtatttcctagatctgttcactgaaagagcttagaaacaataacaccccagtatcttggttcctaaattccattctctaatcacagtaaccaggactccttgaagaaatggataattataggtctggggcatcttgcattgtcagaaaataaggaagtgctcacgaaacaaaggatgtgggcatgtctgaaggccataccagccaacctcaaagagctcctaatagccaaagctggaataatttgagcaacaaaataaataatatgatgtactgcattatagtccaagatataaaataaatatacctgcacataactgtatactgggagaagagacatcttccttatagaagaatttcgagtaatgtttgcagatacctccccgttcactagctaggccttagccctccctacaccttgagtgtggactgaatttagtgactcacttctaagagacagagtatggaaaggtggggaaaaagtaaatttacagtggagaaacctgccagcactaccttgaccaagtaatcaaagtttaacacaaccagcagtaaaccatgtt

SEQ ID NO: 2707 - DNA, 301 bp, Homo sapiens
  source 1..301: mol_type = other DNA
gccagacatggtgacccacacctgtaatcccagcattttgagaggccaaggcaggaggattgcttgaggctaggagttccaggaccagcctgggcaacataaagagacactttcctctacaaaaaaattttaaaaaattatccgggtatggtggcacatacttgtaaatcctagctacttgggaggctctggcaggaggatctcttgagcccaggagttcaaggctgcagtgagctatgataaagccactgtactccagcctgggcaacagagccagaccctgtctcttaaaaaagaaaaa

SEQ ID NO: 2708 - DNA, 790 bp, Homo sapiens
  source 1..790: mol_type = other DNA
aaacctacaatgagatatcagttcacattctctagaatggctataataaaaaagacaatacaagcattggcaaggatatgaagcaattggaaacctcatactcagctggtagtgatataaaatagtacagccacttaaaaaataatttggcggcaacttaagaaggttttacggaactaccatatgattcaacaatttcactaggtatatacccaagggaaaaatatatgtccatataaaaatgcagacacaaaagctgattgcagctttatatataataaatagccaatgtggaaacaacaaaatacccaccaatggaagactggataaacaaaacgagtggcatgtaggagtacttcattctattttattaccaaacaatattttactgaatgcagtactgatacatgccacaacttggatgaacctagacaacacgatgctccataaaagaagccagtcacaaaataccacatattatgattccattttaatggaatgaccagaataagcaaatcaagagacataaagtagactcgtggttaccaggggctaggaagtagggagtgaagagtaagggcagggcggaatgtgaaatgactagtaacgggtatggggtttttttgctttggtttctttgaggaggagataacaatgttctaaaattaagactgtggggatggttgcacaaccctgtgaaaatgctacaaaaagaacatcgaactgtaaactttaaatgggtgaattatgtggtatgtaaattatatctcaataaagctgttttttaaaa

SEQ ID NO: 2709 - DNA, 178 bp, Homo sapiens
  source 1..178: mol_type = other DNA
aattagctgggtgtggtggcgtttgcctgtagtcccagctactcaggaggctgaggtaggagggtcttgtaagcccaggagttggaggctacagtaagccgtgattgcaccactgtgctccagccaaggtgacagagcaagaccctgtctcagacaaaaaaagagaaaaaaaaaaaaa

SEQ ID NO: 2710 - DNA, 83 bp, Homo sapiens
  source 1..83: mol_type = other DNA
tagtattttagcttgaatccacttgaccaccaatcatgactccaaatggcttatactgtttccaaatatcaaaaacaccttca

SEQ ID NO: 2711 - DNA, 1941 bp, Homo sapiens
  source 1..1941: mol_type = other DNA
gaggaacttcaagaagcctgactggaggcatctgacacttacctcctccacagacaagaaccaaaatagcaagtgcataatcaaacttcgaatagagcatctaagagagaatattggaattcaacagagaaggaacaggaagcacctgaggcatggaaggagcaggaagggaggcagtcagctcagctgggatcagctgggagctcataaagactccctagttcaggaaaagggtaagcagtagatacccacctttccatattcccaccatggactcctgataccctagccatgggagaccccatcacaggctctcagaatagcatagggacctgcctggagatgacacaaaggcattgctctagagtgggagttcataatggtccaacgcacccaccaagtcctaagcagattcaccatagggccattttgagagcttaggacccactggaggttgcatcccgccttggggcccaagagcccctgcaccttcacgtccctggagccccactgacaccattctgtgtccacccagagagccgtagcagcaataacaccagtcagactcagcagaatggcagggtccccagcactccagcacacacagtgccctgtatgccaggtaaacggtggtgcagcaccctagggaggctctcccaggacaaagaaagccaaagcacatactctctatggccagagaaccacctacctgggacagctaccacatataatgaccctgcccccagcagcagggctactgcaatcacactctgaggacagaccctctcatcaccagccacagccactattgctgccaccagaagccaaaacacatgtagctggtcacgactccatctaccaagcagcagggctcccatcacgcatttgcacatttcctgagaactagttttccctgctgctactacagctgatataccactgccactgccactggggattaaagcatccctcctcccacacagcctaagaactgcctgcctgtggctatagttactgtcagaaactctgcctctactccaacagcaggactgcagcatacttggacataccctaatggcaggctttccctgcctaccacccctgttgtagcagactcccaagctctctactgggagcctgagtgtcactcctctctgcccaccatagccagggcctgattacattcctggggtccctggaaacaggcctacctggcctggcactccccccactccagtgccctagaacactgtctaagggcttgtctcaccctgtccaccaccactggcatctgtgcagtcctcctagggctgctaccaccacagcagcacccactgcacatactgcctagggaatgagggactgacatacccagctccttgtagatatcactaacaccaatgtgtgtcacttcagagcccaaggattgtcttgccattactactgccatcacccacatcacacatgctatccagggaccaaggacccactcgactgactgacccaccactaccactgcagcacttcagccatctgtagacctaagtattggcctgtttcaacccactaacactggtgacttcatacgccaactgggaacccgaggccaggcatgcttggtctactgctgccgcgactggaatctgatgactggcctacctgtaatcctcatcctcaacaaaacctcaccatagcctccactaacaacaacaacctaagccacttaggaaatcacagacacagctgatgctgtttacagctgaataaatcatatggagactacactactgcatgcacccagaatcaaagctagtgtcctacccaaccaacagcatagatgtatcttcaggaaaaatcccttcccttgtaaaagtcaattcaaaaaaaaattggaagaagtgactgttacaccggaggtacagttatcaacgtaaaaacaca

SEQ ID NO: 2712 - DNA, 841 bp, Homo sapiens
  source 1..841: mol_type = other DNA
aaaaaaaaaacagagcttttggcaatggaacaagggttggtgtgacaaaatctgaaacttgagggacctctaaagaacatgcagtctacccctgaagacattagtcaaaatctgaagctactcaaagcagaaattgaagaggtagttcaaaaaggaccaaaaaaatagttaaatttttgcagtcctttattgctgaggagacaaatatttacaacgatttccaaggaaaatcatgaagggccactctctccaggaaaaaggcaaaggagagatagacttagtcttccaaaaatggtcatgtcaccttgacgtaactcttttcatggctcctttaagattatcggagtaagttcccaccacgccattttatctggctagcagaaggaagagcaaagatcttctctagacaaagtgatcatcatctggagcctctaccatttcatattttaaattcacaatgtcttcattcaacaaaagttagcagatatggagaaagaaaagatagaagcatgaaattgataatgtaaagaaacaggcactcaatgagtcagtttttggtgttggcaagaattcatttgaaaatagctataatattatgttcaagattacaaaggaaataggggaaaaagatgaaaagatggaaaactgcaactcaaaacaacaaaataaataaaacaataaaatcaaatggaaattctacaactggaaactgacattaagaactcagtggatggatttaacaaagagcaacagaaaataggatcatagaacttgaaacaggatattagaagatatccaaactgagtcacagattaaaattaacacagataaacagaaaaga

SEQ ID NO: 2713 - DNA, 309 bp, Homo sapiens
  source 1..309: mol_type = other DNA
ggccgggcgcggtggctcacgcttgtaatcccagcactttgggaggccgaggcgggcggatcacgaggtcaggagatcgagaccatcctggctaacacggtgaaaccccgtctctactaaaaatacaaaaaaattagccgggcgtgatggcgggcgcctgtagtcccagctactcgggaggctgaggcaggagaatggcgtgaacccgggaggcggagcttgcagtgagccgagattgtgccactgcactcccgcctgggccacagagctagactccgtctcaaaaaaaaaaaaaaaaaaaaaaaaaaa

SEQ ID NO: 2714 - DNA, 298 bp, Homo sapiens
  source 1..298: mol_type = other DNA
gctggccgtggtggctcatgcctgtaatctcagcactttgggaggccaaggtgggtggatcacttgaggtcaggagtttgagatcagcctgaccaaaatggtgaaactccgtctctattaaaaatacaaaaaattagccaggcatcgtggtgcacgcctgtaatcccagctattcaggaggctaaggcaggagaatcctttgaacctgggaggtggatgttgcagtaagccgagatcacaccaccgcactctagcctgggcaacaagagggaaactccacctcaaaaaaaaaaaaaaa

SEQ ID NO: 2715 - DNA, 1688 bp, Homo sapiens
  source 1..1688: mol_type = other DNA
gtaaattggtaccagcagagtggggcattgctgaaaagataactgaaaatgtggaagtgactttggcactgggtaacaggcagagattggaacagtttgaagagctcagaagaagacaggaaaatgtgggaaagtttggaacttcctagagacttgttgaatgcctttgaccaaaatgctgatagcgacatggacaataaaatgcaggctgagatggtctcagatggagatgaggaactttctggaaactggagtaaaggtgattcttgctatgttttagcaaaaagactagcgtcattttacctctgccctagagatttgtggaactttgagaaagatgatttagggtacctcgcagaagaaatttctaagcagcaaagcattcaagaggtgagttggatactgttaagggcattcagttttaaaagggaaacagagcataaaaattcagaaaatttgtagcctgatctggcagaagaaatttctaagcagcaaagcattcaagaggtgagttgggtactgttaagagcattcagtttcaaaagggaaacagagcataaaaattcagaaaatttgtagcctgactatgcaatagaaaagaaaaaccagttttctggggagaaattcaagccagctgcagaaatctgcataagcatcaagaagcctaatgttaatccccaggaccatggggaaaatgtctccaggccatgtcagagaccttcacagcagcccctcctgtcacaggcccagagatccaggaggaaaaaatggttttatgggccaggaccagggtccctgtgctgtgtgcagcctatagacttggtgccctgtgtcccagctgctccagccatggctgaaaggggccaatgtagagctcatgctgtggcttcagagggtggaagccccaagccttggcagcttccacatggtgttgagcctgtaggtgcacagaagtcaagaattgaggtttgggaacctccacctagatttcagaagatgtatggaaatgcctggatgtccaggcaaaagtttgctgcagaggcagggccctcatggagaacctctgctagggcaatgcagaagggaattgtggggccggagctcccacgtagagtccctaatggggcattatctagtggagctgtgagaagagggccaccgtccttcagaccccagcatggtggatccactgacagcttgcaccatgcgcctggaaaagccgcagacactcaatgccagtccgtgaaagcagccaggagggaggctgtaccctgcaaggccacaggggcagaactgccaaagaccatgggtccccaccttttgcatcagcatgacctgaatgtgagacctagagtcaaaggagatcattttggagctttaaaatttgattcctgctggattttggacttgcatgggtcctgcagcccctttgttttggccaatgtctcccatttggaatggctgtatttacccaatacctgtacccctatcgtatctaggaagtaactagcttgcttttcattttacaggctcataggcagaagggacttgccttgtctcaaatgagactttggactatggacttttgggttaatgctgaaatgagttaagactttgggggactgttgtgaaggcatgattggttttgaaatgtgaggacatgagatttagagggggccaggggcaga

SEQ ID NO: 2716 - DNA, 296 bp, Homo sapiens
  source 1..296: mol_type = other DNA
gactaggcatggtggctcacacctgtaatcccagcactttgggaggtcaaggtgattggatcacttgagcccaggagattgacaccagcctgggcaacacaggaagacccgtctctacaaaaaattttttgccaggcatggtagcatgcacctgtagtcccagctactcaggaggctgaggtgggaggatcacttgagcccaggaggtcaagactgcagtgggccatgatcacaccactgcactccaacgtgagcaacaggatgagactgtctcaaaacaaaacaaaacaaaagaa

SEQ ID NO: 2717 - DNA, 1571 bp, Homo sapiens
  source 1..1571: mol_type = other DNA
atcatgaaaatggccatactacccaaggtaatttatagattcaatgctatcaccatcaagcgaccactgactttcttcacagaattggaaaaaactactttaaatttcatatggaaccaaaagagcccacatagccaagacaatcctaagcaaaaagaacaaagctggaagcaccatgctacctgacttcaaactatactacaaagctacagtaaccaaaatagcatggtactggtaccaaaacagatatatagaccaatggaacagaacagaggcctcagaaataacaccacacatctacaaccatctgatctttgacaaacctgacaaaaacaagcaatgggaaaaggattccctatttaataaatggtgctgggaaaactggctagccatatgcagaaaactgaaactggatccgttccttacaccttacatgaaaattaactcaagatggattaaaaatctaaatgtaagacctaaaaactctagaagaaaacctaggcaataccattcaggacataggcatgggcaaagatttcatgaccaaaacaccaaaagcaatggcaacaaagccaaaattgataaatgggatctaattaaactaaagagcttctgcacagcaaaagaaactatcatgaaagtgaacaggcagcctacagaatgggagaacatttttgcaatctatccatctgacaaagggctaatatccagaatctataaacaactgaaacaaatttacaagaaaaaaaaacccatcaaaaaagtgggcaaaagatatgaacagacacttcccaaaagaagacatttatgcagccaacagacatatgaaaaaatgctcatcatcagtggtcatcagagaaatgcaaatcaaaaccacaatgagataccatctcataccagttagaatggcaatcattaaaaagtcaggaaacaacagatgctggagaggatgtggagaaataggaatgcttttacactgttaggagtgtaaattagttcaaccattgtggaagacagtgtggagattcttcaacgatctagaactagaaataccatttgacccagccatcccatgactgggtatatacccaaagggttataaatcatgctgctataaagacacatgcacatgtatgtttactgcggcactattcacaatagcaaagacttggaaccaactcaaatgtccatcgataatagactggataaagaaaatgtggcacatatacaccatggaatactatgcagccataaaaaaggatgagttcatgggatgaagctggaaaccatcattctcagcaaactatcacaaggacagaaaaccaaacaccgcatgttctcactcataagtgggagttgaacaacgagaacacatggacacagggaggggaacataacacacgggggcctgttggggggtggggggctggcggagagatagcattaggagaaatacctaatgtaaatgacaagttgatgggtgcagcaaaccaacatggcacatgtctacgtatgtaacctgcatgttgtgcacatgtaccctagaacttaaagtataattaaaaaaaaaa

SEQ ID NO: 2718 - DNA, 617 bp, Homo sapiens
  source 1..617: mol_type = other DNA
cctaacctttaaatattggattcctaaggtcccttttatcattctgtattctcccttaagaaggtttttatcctctctcattcactgggttatctatttggtgtcacccccaggtaatatctagctcacactttcttcctgagttcaatacctcaaagtatgtttgtatacatgacttacctcatgtgggtgcttcataggtactggaaactcacatttgaaatagaagttatcttcctctcctctaaaatgtcttttaacactgcttctgacttccctgacctcagtatataacattgccattcatctgcctggtccctcaagtgaaaaaacacaaaaaccatcgtatgctcttcctttccctttgttcccctcccctcacatattataagcccctagttcctgctattattaatgtcattaagttctcctaaattcagccatgacccttcccttctgtctcttagctcaaggcttcttccggaacctcatagctgattgtcttcttttgggcattgcttttctcaagtcattttgtacactgcaactagagtgaactttttataaaaggcagcctgatcatctgtcctacttgaaagccccagtagcttcccatt

SEQ ID NO: 2719 - DNA, 337 bp, Homo sapiens
  source 1..337: mol_type = other DNA
tgggctgaatgtctgtgttccctcaaaattcatatattgaagcccttattccctaatatggctgcatttgaagatgaggcctttgggaggtacttagggttggattaggttatggagccttcatgatgggattagtggccttatgagaagaaaggttcccccacccctccctccaaggagcacagagaaaaggccatgttaggataaagtgagagggtggctatctgcaagccagcaagagagcccttacccaaaactaaactctgcctgatcttgtcatggacttctagaatacatttctgttgtttaggtgcccagtctgatattttgttatggc

SEQ ID NO: 2720 - DNA, 300 bp, Homo sapiens
  source 1..300: mol_type = other DNA
gccgggcgcggtagctcacgcctgtaatcccagcactttgggaggccaaggtgggtggatcacctgaggtcaggagttcaagaccagcctggccaacatggtgaaaccccgtctctactaaaaacacgaaaaattagccgggtgtggtggcacgcgcctgtaatcccagctactcgggaggttgaggcaggagaatcacttgaacgcgggaggcggaggttgcagtgagccaagactgctccattgcactccagcccgggcaacaagagttaaactccatcaaaaaaaaaaaacaaaaaa

SEQ ID NO: 2721 - DNA, 136 bp, Homo sapiens
  source 1..136: mol_type = other DNA
aggtctgtagtcttgggcaagtcacctataaactcactgagattattttttcatctgtaaaatgggaagagttatgtttatttttgaagggtattaggataattaaaaataatgtaatgtgcctagcacactacct

SEQ ID NO: 2722 - DNA, 225 bp, Homo sapiens
  source 1..225: mol_type = other DNA
cagcctggacaatatagttgagactcggtctctataaaaaatttaaaaagacaaatcagccaggcatggtggctcacacctgcagttccagctactcggaaggctgaggtgggaggatgacttgagctcaggagttcaaggctgcagtgagccatgatggtgccaccacactccagcctgggtgatggcagagtgagaccctgttttaaaaggaaaaaaaaagaa

SEQ ID NO: 2723 - DNA, 263 bp, Homo sapiens
  source 1..263: mol_type = other DNA
gccaggcacagtggctcacgcctgtaatcccagcactttgggaggctgaggcagatggatcccaagtccaggaatttgagacgagcctgggcaacatagtgagagcctgtcaacaaaaaatagaaaaattagttgggcttggtgatacacatctgtagtcccagctatttgggaggctgccttgatatcaggcagtcgaggctgcagtgagctgactgccccactgtattccagcctgggtgaccccatctcaaagaagaaaa

SEQ ID NO: 2724 - DNA, 2809 bp, Homo sapiens
  source 1..2809: mol_type = other DNA
gacttctagttcaaaaatggcagtgtagacgcaagctggcttcacttccacaccagaaaaccaaaaacaaatatacagcactgagattatcaccaacaatatcccagaactcagatatgaggatgagtcaattcctggggacacagaagtgaaaaaactctgagcatggtaaaagaatcagatttttatatctgtggtgccccttgccacaatctgtccagcaccaagtgtgtggaaaactttccccaactcacagtttctacaatggaaaaagtgagatcaaggtagacaaccaacctccctaccatcctggattccctggaaagagacctgtccctgactcaccccatgggaagtatcatgagtaccttgagggaaaaacattaccgaggacaaccagagacaaagggaggaggcaggacttcaatccccagccctggaaactctgctctgtaacttgatcaaagaagatgccagatcagagtggttactcagcagcaccagctgtaggagatgcattccacagatcctcttggcacaaacctttagccggcctttcacactgccaggatatccgctttgggacctcccccatttgagaagggcatcactctgatgagtttctagagtggaggcaaacctgggcttaaggtgccatcaagttccaaaagggagacagtgacctagtgggaaaataagaaatttaacagataagtcacaaagaatctctaagcaaacatccccgacagaaaacaaaacaatcaagacagagaagactggaataaataatccttcaatgcaaagatatggacgtacatccacaagaaaaacaacagcaatagggaaccatgacctccccaaatgaataaagcaaggaacaagtgtctgaatctaagaaaatggtgatatgtgagctctctgaccaagaattcaaaatagcagttttaaggaaactcagtaacccccaagataacacagacaagcaatctataagtttatcagagaaatttaacagattaaaataattttaaaaaagcaaaattctcattactgagaaatatatttgctgaactaaaaaaaaattagatgaaccacagaatggatcaaggagaagaaaaagtcagtgagctcaaagacaggccatttgaaattacacagtgagggggagaaaagaaaaaagaatgaaaaagaatgaagatcacttacaagatatagaaaattatctcaaaagaccaaatcgaagaataactagtgttcaagaaaaagttgagcaacagcaaggggtagaaagcttattcaaagaaataataaaatttttttcccaaaacttaagaaagatataaatatccaggtatgcaggtcagagaacactaaacagattcgacccagataagactacccgtaggcatagtcgaactctcaaagggcaaggacaaagaaagggtcctaaaagcagcaagagaaaagaagcaaataacataaattccaattcatctggcaacagacttctcaacagaaaccatacaggccaggagcaaatgggatgaaattttcagtgttgaaagaaaaaaatgtctgccacacaagaatactgtatccagcaaagctatccttcaaccatcaaagcaagataaagtctttcccagataaacaaaagctgagagaattcaccaccatgaggcccatcttaaaagaaatgctaaagggagttcttcaatccacaagaaaaaaaaaaaaaacaccaatgtgcaaaaacaaaaacatttgaaggtataaaacccactgatgaaattaagtacaaagacaatccccaaatacttcaatactgaaattgtggtgtgtaatccacttataactctagtatgaagaccaaaagacaaacctaccaaaaacaataacagctacagcaacctgttaagagataagcaatataaaaatatgtaaattgagacaaacaaaagtcaaaatgtagaagggatggagttaaggtataaaggcttttttttttagttttttcttttctttttttttttttttaatctaagataagttgtcatctctttaagatgacttggtatatctatgttttatgtaagcctcatggtaaccacaatgtaaaaacctataatagacacactaaaaatgaaaagcaacaaattaaaacatactccagagaaaatcacttaaccacaaaggaagacaataagaaaggaagagaggaattataaaacaacaattagaaaacaagcacaaaatgacagtagtaagtccttacttgtcaataataacactgaatgtaaggggactcaattctccaattaaaaggctgaactgataaagaaacaagcccttaactatatgctgctaacaagaaacttacctcccctgtaatgacacacatagacggaaagtgaagggatggaaaaaaaaatctatgcaagtagaaatcaaaaaagatcaagaataactatactcacatcagataaaatggactacaagtcaaagactataaaaagagacaaagaaggtcactatataatgacaaaagagtgaattcagcaagaggatataataatttatatatctacgcacccaacactggagcactcaattatacaaagcaaacattaatagatctaaagggagagataaactgcaatacagtaatattaggggacttcaacaccccattctcagtaacagataaatcatccagacagaaaatccacaaagaaactttggagttaaactacatactagatcaaataggcctaactgacatttacagaatatttcacccaacagctac

SEQ ID NO: 2725 - DNA, 217 bp, Homo sapiens
  source 1..217: mol_type = other DNA
ggggacagcaatctatggtccatggactgaatccagcctacttttgtatggctctgagctaagaatcgttttaatattttttaaaggttgttaaaagcaaataacaaagaatacatgatgactctattcttgttctcatgtgtgaaccatatattatagcctgcaaagtctaaaatatttataaaccggccctttacagaaaaagtttgcagaccct

SEQ ID NO: 2726 - DNA, 290 bp, Homo sapiens
  source 1..290: mol_type = other DNA
gctgagcatggtggttcacatctgtaatcctagcattctaggaggctgaaccgggaagattgcttgagcccaggagttcacaagcaccctgggcaacatagcaagaccctgtctctacaaaaaataaaaaaaaatcaatcgggtgtgggggcatgagcctgtggtcctagtacttgggaggctaagatgggaggatcctttgagttcaggaatcagaggttgcagtgatcatgccactgcacatcagcctgggtaaaggagcaagaccccatctctaaaaaaaaataaaa

SEQ ID NO: 2727 - DNA, 271 bp, Homo sapiens
  source 1..271: mol_type = other DNA
tgggtggctgaggcgggtggatcacttgaggtcaggagttcaagaccagcctgggcaacatggtgaaaccccaactctactaaacatacaaaaattagccaagcctggtggcacgtgcttgtagtcccagctactcgggagactgaggcaggagaatgtcttgaacccaggaggcggaggctgcagtgagccaagatctcgccactgcactcgagcctaggcaacagagcaagactgtctcacaaaaaaaaaaaaaaaaaaaaaaaaaaaa

SEQ ID NO: 2728 - DNA, 331 bp, Homo sapiens
  source 1..331: mol_type = other DNA
catggaatagtacacagccataataaatgaattcatatcctttgcagtaacacggatggagatggaggtcattatccttaggaagctaaggcaggaacagaaaaccaaatactacatgttcttacttataaggggagctaaacactgagtatacatgggcacaaagaaaggaacaatagacaccagggcctacttgaaggttgggataaaaaaaacgacctatcaggtactatgcttattacctgggtgacaaaataatctgtacaccaaacccccatgacatgcaatttacctatataacaaacctgcacatgtatgcatgaacctaaaa

SEQ ID NO: 2729 - DNA, 114 bp, Homo sapiens
  source 1..114: mol_type = other DNA
aagcaaatacaacaagctattagaagtcatagaaacttggtggtagatttatgggtgttcactctacaattatttcaactttcttgatgttcacaataaaacgaaggaaaacaa

SEQ ID NO: 2730 - DNA, 98 bp, Homo sapiens
  source 1..98: mol_type = other DNA
atgagccttggagttaggctgggttcttatcttgtctttgtcactcactagctgtgtggcctaagctttagattccccagctttaaaatagactacct

SEQ ID NO: 2731 - DNA, 310 bp, Homo sapiens
  source 1..310: mol_type = other DNA
gccgggtgcagtggctcacaccgataatcccagcactgtgggaggccgaggcgggcagatcacttgaggtcaggagttcgagaccagcctgaccaatatggagaaacccccgcctgtactaaaaatacaaaaattagccaggcatggtagcgtgtgcctgttgtcccggctactcgggaggctgagacacgagaactgcttgaacccaggaggcggaggttgcagtgagccgagattgtgccactgcactccaccctggatgacagagcaagacctcatctcaaaaaaaaaagaaaaaaaagaaaaaaaa

SEQ ID NO: 2732 - DNA, 304 bp, Homo sapiens
  source 1..304: mol_type = other DNA
gctggacgcagtggctcacgcctgtagtcccagaactttgggaggccatggtgggtggatcatgaggtcaagagttcgagaccagcctggccaacatggtgaaaccccgtctctactaaagatacaacaaattagctgagtgtagtggcatgcctgtaatcccagctactcggaaggctgaggcaggagaatcgcttgaacccagaaggcagaggttgcagtgaggcgagatcgcgccattgcactccagcctgggcaacaggatgagactctgtctcaaaaaaaaaaaaaaaaaaaaaaaaaa

SEQ ID NO: 2733 - DNA, 3117 bp, Homo sapiens
  source 1..3117: mol_type = other DNA
agtggtctcaccataccatagagcacagcaagcagtaccaatctacttcaaagcatgggaagtaaccaagccaaactagagaacctgataccaaggtctgcctgtctggtggtgttaccagaacgttcatccagaaccccaggctaaattagatagtaaagatctattagcaccacagaacacctacaaaggctgtaacaggtgtttgtttgccttttcaaatttgaagccagcagtgtaagaacacaaagattatgaagaatcaaggaaatgtgataccaccaaaagaaactaataaagctccaaaaatggacccagagaaaatgcagacctatgacatgactgatagggaactcgaaataatctccttaaagaagttcagggaactccaagaaaatacagattaaaaaataattaaaatttggagaacattttataaacaaaagtagaagtttaacaaataaatagaaacaataacaataaaaatcctagagataaagaatgcaatacccgaactgaaaatttcaatagcaagctttaactacatacttggtcaagcagaagaaagactcggtgagcatagaaataggacatttaaaattattcacccagaagagaaaaaaaagaagaaaggaaaagaataaaaaaggcctatgggaattatcaggcaccatcaagcaaactaattttcaccaaacaggttttctgaaggataagagagagtaaaaggcctagaaaacatacttgagaaactaatggctggaagttaaagttttctaagtcttagaaaaaaatgacaatagccaagtacaggaagctcaaaagtcaccaatttcaatccaacgatgagttcaacaagaaacattataatcaaagtatcaaaaaccaaaaatagagaaagaatactgaaagtaaaaccagagataagaaatatatcacattcaacaaagccccaatatagctttcggtgattttctcagcagaaaccctgcaggacagaagagagtgggatgatatattcaaagtgctgaaggacaaaaaaaaccctgccaactgtgcccaacaaagctgttctttagaaatgggcataaaaaccttcccaagcaaacaaaagctaaaggagtttatcaccactaggcctgtcttataggagttgctaaaagaagttatttaagctgaaaagaagctgctaattaacaacgaaacacatatgaaagtaaaaatacaaacaaactgtaaatatcgtaagtaatacctagtcatactcagtgctttttagtactgtaaagatggtgtgtaaagcaattttattcctactatgagaatttaaaaaaaaacattaaaaacaactgtagctacaataaattgttatagaattacaaattacaaaaacaaatgtaaattttcacatcaaaatcttaaaaaggctagaaagtgaaagtcatgcaattaaaggcaagctcttatcagcttaaagaattctgttacaaggatattttatgtaagcctcattgtaaccacaaagcaaaaatgtatagtagttgtaccaaatataaaaaggattcaaagcataccaccacagaaaatcatcaagccacataagaagatagcaagagagcaagaaacaaaggacctacaaaacaatcagaaaaatagttacaaaatggaagttgcaagttctcacctatcaataattactttgagggtaaatggattaaattctagaataaaaagatatagagtggctgaataaaaaaataccacaaaatctaaccatgttctgtgtacaagagattgactttactggtaagaacatacatagactgaaagtgaatgatggaaaaagatattctgtgaaataacctgaaaagggcagttgatgctatatatgttggacaaaatagacattaagccaagtagagaaaaaaaaagccattacataatgatacagggattaattcaccaagaaaacaaaataattgtaaatatatatgcacccattatcagagcacttaaatacacaaagcaattattcagtgatctcaagaaagagatagactgcaatactgtaatagtagggaacctcaaggtaccactgtcaacaatggacagaccatcttgaccgaaaattaataaggaaacactggagttaagttacactttagaccaaatggacctaacagatacatagatccttccatccaatagcagtagaatacactttcttttcaagtgcagagggatcattctctaggatagatcatgttaggccacaaaacaaatcttaacaaatttaaaagacctaaaataatatgaaaccgagttttgagataatttcagcatgaaactagaaatcaataccaagagatattgagaaaaataaacagatatgtgggaattaacatgctcctaaacaactaatgggtcacagaatcaatgaaaaaataccttgagacaaacaaaaaggaaaatgtaacatatcaaaacttattagatgtagcaaaagcagccctaagaggaaaatttatagtgacaaatgcctataaccaaaaatatgctataatacaaataggcaatttaatggtacaccttaaggaactagaaaaagaagaataagctaggccccaagttatcagaagaaagaaaatagcaaagatcagagcaaatataaatgaaacagaccctaataaagtgagaaaaaaactcaacaaaaccaagagtcagatctttgaaaagatcaacaaaattgatgaacccttagctgcactaacaaggaaaaaaataaaatactcaaataagattagtaatgaatcaagagaaattacaactgataccacaggaatacaaaagattataagaagccactatgaacaattatacaccaaaatatttgataatgtagaagtggctaaatttctagtcacatacacctaccaagactgaataataaagaaacagaaaatctgaagaccagtaattagtaaggaggatgaatcagtaataaaaagtctcccatcaaaaagcacccaggagtggattatgtcagtgatgaattccaccaaacatttaaagaactaatatcaattcttcccaaactcttctaagaaactgaagtgg

SEQ ID NO: 2734 - DNA, 307 bp, Homo sapiens
  source 1..307: mol_type = other DNA
gctgggtgtggcggcacactccttttttggaggagcattttgggaggcaaggtgggcagattgcttgagtccaggagtttgagaccagcctgggaaacatggagaaaccccgtccctacaaaaaaaaaaaaaaaaaaaaaagttagtcagcctggtggcatgcatctgtgatcccagctactcaggagcctgatgtggaagaaacacctgagcctgggaagtcgaggctgcagtgaatcgtgattgcaccactgcacctccagcctgggcgatggagtaagaccctatcactaaataaataaataaa

SEQ ID NO: 2735 - DNA, 1519 bp, Homo sapiens
  source 1..1519: mol_type = other DNA
tcccaaaggaatatttttgaagaaacagaaaaaaaaaatcttaaaattcatatggaatctcaagggaccccaaatagccaaaataatcttgaaaaagaacaaatttggaggatcccacttccagattttaaaacctacttcaaagcaacagtaatcaagatgatgtggtactggcataaacagatatatagaccaatggaacataatagcccagaaataaacccttgtgtatatggccaaatgatttttgacaacggtgccaagactacataatggggaaaggacagtctcttcaacaaatggtgttgggaggactggataaccatatgcaaagaatgaagttggacccttaccttacactatatgcaaaaattaattcaaaagcgattaaagacctacataagacctaaaactatacaactcctagaagaaaacataggtgagaagcttcaggacactggatttggcaaagatttcttggatatgacatccaaagcatacataaaaaaaccaaaaacagacaaatgtgtctatatcaaatgtaaaaaaattgtgcatcaaaggaaataactgagagcaaaaaggcaagctatggaatgggagaaaatattgcaaatcatatattggataatgggctgatatacagaaaataaaaggaatgtttacaactcaacaacaaaaaccaaataactcaattaaaacatgggcaaaagacttgaataggcaattctctaaagatatataaatgaccaacaagcatatgaaaatatgcttgacatcactaattgagagaaatgcaaatcaaaaccacactgagatataacctcacaccccttaggatggtcactatcaacagaaaataacaagtgttggggaggatgtggagaaattggagcccttgtgcactgttgtagggagcgtaaagtggtacagccattataaaaaacaataaaaaattaaaaatagaatcctcaaaaaatgaaaaatagaatgtgatccagcaaatccacttgtgggtatatatcaaaaagaattcaaagcaggctctggaagagaaatttgcacacccatgttcactgcagcattattcacaatagccaagaggtggaagcaatccaaatgttggagagatgagtggatagagaaaacatggtatatacaagcaatgaaatactatgcagccttaaaaaagaaggaaatactgtcacatagaacaacgtggatgaatctcaaggacattatactggcaaaacaagccagtcacaaaaggacaaatactgtattactccacttatgtgaaatatctaatgtagtcaaaatcatagaaatgaaaagtagaaacgtagttgctaagggattgcggggaggagaaaaattagggttttatgagtttggagtttcaattttgtaagacgaaaaagttttagagatctgttgcacaacaacgtgaatatacttaacactactgaacagtacatttagaaatggttaaggtggtaaatttgttagatgtctttta

SEQ ID NO: 2736 - DNA, 1715 bp, Homo sapiens
  source 1..1715: mol_type = other DNA
gtccatactacccgaagcagtttacagattcaatggaatctctatcaaaataccaatggcatacttcacagaaatagaaaaaaataacctaaaatttacatggaaccacaaaaggctccaaatagccaaagccaccctgagctaaaaaaaaaacaacaaaattggagaaatcaaattacctgacttgacattatactgcagagccatagtaaccaaaacagcattgtaactggcataaaaacagacaaagagaccaatggaacagaatagagaacccaaaaataaatctattcatctacagtgaactcattttcaaccaagttgccaagaacatacattaggggaaggacagtctattcaataaatagtgctgggaaaactggatatccttatgcagaagaataaaactagacccctatccctcaccatatacaaaaatcaaatcaaaatggattaaagatttaaatctaagacctcaaactatgaaactaccacaaaaaaacactggggaaattttccaggacattggtctgcacaaagatttattgagtaataccctacaagcacaggcaaccaaagcaaaaatggttaaatgggatcacatcaaaagcatctgcagagcaaaggaaacaatcaacaaagtgaagagataacccatagaatgggagaaagtatctgccaactatccatctgacaagggattaataaccagaatatataaggaactcaaacaattcaataggcaaaaaaacccaataatcctatttaaaagtaggcaaaagatctgcatagatatttctcaaaagaaaacacacaaatggcaaacaggtatatgaaaaggtctcaacatcactgatcatcagagaaatgcaaatcaaaactacaatgagatctcatctcatcccagttaaaatggcttttatccaaagacaggcaataagaaatgctgatgaggatgtggagaaaaagaaacccttgtacaccactggtgggaatgtaaattagtacaaccactatggagaacagtaggaggttcctcaaaaaactaaaaatagaggtaccatatgatccagcaatacagctgttaggtatatacccaaaagaaagtaaatcagtatattgaagggatatctgtactgccatgtttattgcagcactattcacaatcgccaatatttggaagcaacctaagtgtccattaacagatagtggataaagcaaatgtgatacatatacacaatggagtactattcaaccattaacaaggatcagatcctctcatttgcaacaacatgaatggaacaggaggacattaagtaaaataagccaggcacagacaaactttgcatattctcactcatttgtgggaactaaaatgtaaaaccattaaactcacggagatagagattagaatgatggttaccagagtctgggaagggtattgggagtggggaagaagtggggatggtcaatgagtataaaaatatagtcaggtagaacgaataagatctactacttgatagcacaacagggtaaatatagtaaacaataacttattgtacattttaacataactgaaagtataactggaatgtttgtaacacaaatgataaatgtttaccctgatgtgataattatacattttatgcctgtatcaaaatatctcatgtagcccataaatatatacacctactgtgttcccataaaaattaaaa

SEQ ID NO: 2737 - DNA, 275 bp, Homo sapiens
  source 1..275: mol_type = other DNA
ggcattgtggtttatacctgtaatcccagcactttgggaggctggggctggaagattgcttgagcccaggtgttcaagacaagcctaggtaacgtggtgaaactcgtctctacaaaaattacataaattagctggtgtggtggcctgcacctctagtcccagctaggtgggaggtttcagtgtcctgtgattgcaccactgcactccagcctgggtgacagagtgggaccctgtctaaaaaaacataacaaaacaaaacaaaatgaaaaaaaaaa

SEQ ID NO: 2738 - DNA, 102 bp, Homo sapiens
  source 1..102: mol_type = other DNA
aatgatagtataattctgcctgttcttcaggattgaaattttgaactcaatttagatttcctgttttccctcatataccacatctaaacagtctccaaatct

SEQ ID NO: 2739 - DNA, 304 bp, Homo sapiens
  source 1..304: mol_type = other DNA
catgggttggcaatctacagcatgtgggccaaatccagcctgctgcctgtttttatataccctgtaagctaagaatggtttccgcatttttaaatggttgggaaaagaaatcaaagactaataattcatgacgtgaaaattatcagaattcacaaataaagctttattggaactagctatactcatctgtttatatattatctgtggctgctttgaaatgagtagttgcaatagagatggtaaagcctacaaagcctaattatttactgtctggtttttgtcagaaaaaagtttgtcaatcctt

SEQ ID NO: 2740 - DNA, 408 bp, Homo sapiens
  source 1..408: mol_type = other DNA
tctacatctgcttctccagatccattctccacccctcactttttcctgaattctgggaggctgacttttatagactggcttctaggtaagttcaggaattaagaggtatcagcagataggagggtaggagaaaataaggttagtgtatgtatttcctcatctttttcctgctgagccacagggtggcagtggttgtagtgttcctgcacccaaggctacagctccaggaatgttatccactcctagagccctctaggtttgttccttctcttgtcctggtaccttggagtaccagctggctctgttactagtttagcatcttatcatttcttgttggtttctcttaaccctgcacatatacctttgaaatagtccattataatctcaattattccattcagtatgcca

SEQ ID NO: 2741 - DNA, 243 bp, Homo sapiens
  source 1..243: mol_type = other DNA
acaaggaagaataaccaacatatttatacatttagaatcatgtttacacttctctcaactaaaacatctggttaaacagatgttccattcggttattacacaataatctatttcagcttctcatgaatgtacaaagtagactttcttacaattcctggtaaggagactgaatatctcaatcagtattttacccaattagagagagttctcaggaagttacagtcttatttaagctgaaaaata

SEQ ID NO: 2742 - DNA, 128 bp, Homo sapiens
  source 1..128: mol_type = other DNA
ctgcccagggctcccggtggccagtgctcagcagcccgggactccccgcagccttcgcttctttccctgcctgccctcagcgcagctacagcacggaggagaagccccagcagcaccagaaaaccaag

SEQ ID NO: 2743 - DNA, 307 bp, Homo sapiens
  source 1..307: mol_type = other DNA
ggccgggtacggtggctcatgcctgtaattccggcagtttcggaggccaaagcaggtggatcacctgaggtcaggggtttgagaccagcctggacaacatggtgaaatcctgtctgtactaataatataaaaattagcagggcgtggtggcacatgcctgtaatcccagctactcggaaggccgggcaggagaatggcttgaacccaggaggcggaggttgcagtgagccgagatcatgccattgcactccacctgggtgacaaagcaagactgtctcaaaaaaagaaaaagaaaaaagaaaaaaaa

SEQ ID NO: 2744 - DNA, 365 bp, Homo sapiens
  source 1..365: mol_type = other DNA
attttccctttctgagaagtaccccttctccatctagctcaggaactctgggaagatggccacacccaggctccaggggtgggctctaattagtctatgcaaattagttcatcccattcacttctctcccccctttcatgattggtttaagagacaggcctaccagcaatggtatgcaagacctttgctgggatttctgagaaagacacttgctctgtgtagaagctactaggataacttctctcctctggacagtgtggaaaatagacttgagtcttaagagcatggtggccctttgccacaattctgaatgcaatgtcaacccaaggaggaaaggagagctaagataattaagagatgggagc

SEQ ID NO: 2745 - DNA, 432 bp, Homo sapiens
  source 1..432: mol_type = other DNA
tgtgaaagttgtcaaaatcaagttctggtcattgtgttaaaaatcctaacaaatagagctggggaaggccgtgaaaggacgattttcatgcacagatgtctgataatgaggactatcattaaaagactgcacaaaaccacaccttgcacaaaggccatcacaacctgacacacacaaaaaatacttctatgaggacatttgcccagcaactccctgtccaatgtccaactggcaacatccttgttattgatccttgtagccaaggataattctctcaaaacaatcatttttgctttaaaaaccgttgtcttccttgacctccctgtatatgcacatagtttactgtggcacttgtattcttattgcaatgcctactcctgaataaacatcattttctttcagagagtctccctctctgttatttaggctgac

SEQ ID NO: 2746 - DNA, 295 bp, Homo sapiens
  source 1..295: mol_type = other DNA
gctgggcatgatggctcatgcctgtaatctcaacactttgggaggctgaggtgggaggattgcttgagctcaggagtttgagatgagcctgggcaacaggctctactctacttaaaaataaaatcagcaggtgtggtggcatgtgtatagtcccagctacttggaaggctgaaatgggaggatcgcttgaacctgggagatcgaggctgcagtgagccacaatcgcattactgcactccagcctgggtgacagagcaagaccccatctcaaaaacaaacaaacaaaaagataaaa

SEQ ID NO: 2747 - DNA, 106 bp, Homo sapiens
  source 1..106: mol_type = other DNA
tactgtacagtgatgatgttaatgactttgaagcactgaaagttactgaagtgccttctgaatcaaggatttaattaaggccacaatacctttttaatactcagtg

SEQ ID NO: 2748 - DNA, 1269 bp, Homo sapiens
  source 1..1269: mol_type = other DNA
agtcatgcgcagcataatgatgttctggtcaatgatggacagcatatatgatggtggtcccataagattataacagctgaaaaattcctaacacctagtgacatggtagccgtcctaatgttgtagcacaatgcattactcttgtgtttgtggtgattctggtgtaaacaaacctacttcgctactagtcgttatagaagagcaaaggcagaagacacacacatcacaattttaaaactatgaaagtacaataataaagacactgtggtactggcatacagatacacatatagatgtagcagctggttgtccaggctgggtggggtgctgcccccatgcctataatcccagctttttgggagcccgagatggaaggacggcttgagttcagaagttcaaggttacagtgataataataaagattattactggtatatgtatttatgatattgtactttttattttagagtttactcctacttattaaaaaaaagttaactgtaaaggagtctcaggcagtccttcaggaggattccagatgaaggcattgttatcagaggagatgacagttccataagtgttattgcctgtgatgaccttccagtggaacaagatgtggaggtggaagacagtgatattgatgatcctgaccctgtgtagggttaggctaatacgtctgtgtctcggtttttaacaaaaaaagttaaagaaaaaaaaaatagagaaaagagaaaatgatataaagaaaaaaatgttgtacaactgcataatgtatttttattacaacagtcaaaagtttatgaggtaaaaattacagtaaaggttaatttattattggagagagaaaatttaagaaataaatttagcgtagcataaatctacagtgtttttaaagtctacagtactgtacagtaatgtcctaggccctcctattacccagacatgttctagtcctgtaagctgcgttgatggtaagtgccctatgcaggtataccattttttatcttttatgctgtgttgttactgtaccttctctatgtttaggtattcaaatgcttaccattatgttaaaactctctatagtattccatatggtaacatactgtacaggtttgtcgtgtaggagcagtaggctataccatatagcctagtgtgtagtatgctctttcatctagatttgcgaagtttactctgtgatgtttgcacagtgacagaattgtctaatgacgcatttctcagaatgtatccctgttaagtgatgcatgactg

SEQ ID NO: 2749 - DNA, 307 bp, Homo sapiens
  source 1..307: mol_type = other DNA
gccgggtgcggtggctcacacctgtaatcccaacactttgggaggccgaggcgggtggatcacaaggtcaggagtttgagaccaacctggccaacatggcgaaaccctgtctctactaaaagtacacaaattagccaggcgtggtggcaggcacctgcaatcccagctactagggaggctgaggctggagaatcgcctgaacccgggaggcggaggttgcagtgagccaagatcgtgccactgcactccagcctgggtgacggagcaagactcggtctcaaaaaaaagaaaaaaagaaaaaaaaaaa

SEQ ID NO: 2750 - DNA, 293 bp, Homo sapiens
  source 1..293: mol_type = other DNA
ggccgggcacggtggctcacgcctgtaatcccagcactttgggaggccgaggcgggcagatcacgagatcaggagatcgagaccatcctggctaacacggtgaaaccccgtctctactaaaaatacaaaaaattagctgggcgaggtggcgggcgcctgtagtcccagctactcaggaggttgaggcaggagaatggcgtgaaacctgggaggtggagcctgcagtgagccaagatggcaccactgcactccagcctgggcaacggcaagactgtctcaaaaaaaaaaaaaga

SEQ ID NO: 2751 - DNA, 298 bp, Homo sapiens
  source 1..298: mol_type = other DNA
ggctgggcatggtggctcatgcctgtaatcccagcactctgggaggccagggtgggcagatcgcctgaggccaggagttcagagaccagcctggccaacatggcaaaaccctgtctctactaaaaatacaaaaattagccgggcatggtggcagatgcctgtaatcccagctgcttggaagtctgaggaagggagaatcacttgaacccaggaggcgggggttgcagtgagccatagcgccactgcactccaccttgggtgacagagtgagactccacgtggaaaaaaaaaaaaaaaa

SEQ ID NO: 2752 - DNA, 283 bp, Homo sapiens
  source 1..283: mol_type = other DNA
gccaggcatggtggctcatgcctgtaatcccagcgctttgggaggccaaggtgggtggatcacctgaggtcaggagttcgagactagcctggccaacatgacgaaaccccatctctactaaaaatacaaaaagtagctgggcgtggtggtgcgcctgtaatcccagctactcgggaggctgagtcaggagaattgcttgaacccaggaggtggaggttgtagtgagccgagatcaggccattgcactccagcctgggtgacagagcgagactctgtcttaaaa

SEQ ID NO: 2753 - DNA, 308 bp, Homo sapiens
  source 1..308: mol_type = other DNA
ggctgggcatggtggctcaggcctttaatcacagtactatgggaggtggaggcgggtggatcatttcagatcaggagttcaagaccagcctgaccaacacggtgaaactttgtctccattaaaaatacaaaaaattagctgggtgtggtggctcacacttgtaatcccagctcctcaggaggctacggcaggagaatcacttgaatccaggcagcggagattgcagtgggccgagattgccactgtattccagcctgggtgacagagtgagactctgtctcaaaaaaaaaaaaaaaaaaaaaaaaaaa

SEQ ID NO: 2754 - DNA, 307 bp, Homo sapiens
  source 1..307: mol_type = other DNA
ggccgggcgcggtggctcacgcctgtaatcccagcactttgggaggccgaggcgggtggatcatgaggtcaggagatcgagaccatcctggctaacaaggtgaaaccccgtctctactaagaatacaaaaaattagccgggcgcggtggcgggcgcctgtagtcccagctactcgggaggctgaggcaggagaatggcgtgaacccgggaagcggagcttgcagtgagccgagattgcgccactgcagtccgcagtccgacctgggcgacagagcgagactccgtctcaaaaaaaaaaaaaaaagaa

SEQ ID NO: 2755 - DNA, 226 bp, Homo sapiens
  source 1..226: mol_type = other DNA
ggaagagtgcttagtggaaagaggttggattttcaggtcactcagcctcaaatctctgatccatcatttcctggctgtttggatagctagtcaattaacttcttcaggcctattccataaatgtgatatgaaaacaaggtaatgcaacctacttccaatagtggctgcaaagattaaaaaaagacaatggatgtggaaagcctaacccagtggctggcacgtaata

SEQ ID NO: 2756 - DNA, 293 bp, Homo sapiens
  source 1..293: mol_type = other DNA
gctgggtgtggtggcttatgcctgtaatcccagcactttcggaggccgaggtgggtggatcatgaggtcaataaattgagaccatcctggccaacatggtgaaaccccatctctactaaaaacacaaaaattagctgggcgtggtggcgcacacctgtagtcccagctacttgggaggctgaggcaggagaatcactggaacctgggaggcagaggttgcagtgagccgagattgtgccactgcactccagcctggtgacagagcgagactccatcaaaaaaaaaaaaaaaaa

SEQ ID NO: 2757 - DNA, 297 bp, Homo sapiens
  source 1..297: mol_type = other DNA
ggccgggtgcggtggctcacgcctgtaatcccaccaatttgggaggccgacgcaggcagatcacgaggtcaggagattgaaaccatcctggctaacatggtgaaaccccatctctactaaaaatacaaaaaattagccaggcgtggtggcgggcgcctgtggtcccagctactcaggaggatgaggcaggagaatggcgtgaacccaggaggcggaacttgcagtgagccgagatcgcgccactgtactccagcctgggcgacagagcaagactccgtctcaaaaaaaaaaaaaaaa

SEQ ID NO: 2758 - DNA, 2913 bp, Homo sapiens
  source 1..2913: mol_type = other DNA
tgaaaaaattaataagataggccactagctagattaataaagaagaaataggacacaaataaacactatcaggaacaacaaagggtatgttaccactgaccccacaaaaataaaaacagctatcagagaccaccagaaacaactccatgcacatgaactagaaaacctagaagagatggataaattcctggacacacacactcttccaagactgaacaaagaagaaattgattccctggacagaccaataatgagctctgaaatgaaccagtaataaatatcctaccaacaacaacaacaaaaaagcccaggaccagatggattcacagcaaattctaccagatggacaaagagctggtaccattcctaccgaaactattccaaaaaattgaagaggagggactcctccccatcaaatttatgaggccagcatcatcctgatatcaaaacctgacagagacacaacaacaaaaaaaacacttcaggccaatatccttgataagcattgatgtaaaaatcctcagcaaaatgctggcaaactgaacccagcaacacatcaaaaagctaatccaccaagatcaagtaggccttatctctgatatgcaaggttggttcaacatacacaaatcaataaatgtaattcatcagaactaaagacaaaaactacatgattacagatgcagaaaatagatgcagaaaactacatgattatcacaatagatgcacaatgatgcacaatagatgcagaaaaggcttttgataaaattcaacatccttccatgttaaaaaacatgttaaaaaactatcaataaactaggtattgtagggacatacctcaaaatggtaagagccatgtatgacaaacccacagccaacatcatactgaatggggaaaaactggaaacattccccttgaaaagaggcacaagacaagaatgccctatcttatcatgcctattcaacatagtatgggaagttctggccacagctatcaggcaagagaaagaaataacgcatacctaaataggaagagaggaagtcaaactatctctgtttgcagaagacatgattctgtagctagaaaactctacagtctcagcccaaaagctccttcagctgataaacaaattcaccaaaatttcaggattaaaaaaaaaaatcaatgttaaaaaatcactagcattcctatacattcacaactgccaagccacgagccaaatcagtaaagcaattgcattcacaattgccaccaaaagaatacaatacctagaaatacagctaaccagggaggtgaaagatctctacaataagacttatgaaacactgctcaaagaaatcagagatgacacaaatggaaaaatattccatgctcatggatagaaagaatcaatatcattaaaatggccatagtgcccaaagcaacttacagattcaatgctattcctatcaaactaccaatgacattcttcacagaactagaaaacaacaattttaaaactcaaatggaactaaaaaaggggccaaatagccaaggcaattctaagcaaaaagaacaaagctggaggcatcacattacctgacttcaaactatactatggggctacaataaccaaaacagcatggtactggtacaaaaacaggcacatagaccaatggaacagaacagagaccccagaaataaggccacacatctatgaccacctgttctttgacaatgttcaataaacggtgctgagataactggctaactctatgcagaagattcaagctggaccatttccttatatcatatacaaaaatcaactcaagatggattaaagacttaaaagtaaaaccaaaagctataaaaaccctggaagacaacctaggtaatatcattctgaacatagaaactggcaaaggtttcatgacaaagatgccaaaagcaattgtaacaaaagcaaaaattgacacatgggatgtaattaaacttaagtgcttctaacagcaaaagaaactttcaacagagtaaacagacaacctgcagaatgggagaaaattttttcaaactatgcacatgacaaaggtctaatatccagtatctatgaggaacttaaacaaatttacaagaaaaaaaaacagacaaacccattaaaagtgggcaaaggaaataagcactgttcaaaagaaaacacacatgaggccaacacacacatgaaaaaaagctcatcatcactcatcattagagaaatgcaaatcaaaaccacaatggggtaccatctcacaccagtcagaatggcaataaaaagtcaaaaataataggtgctggtgaggttgtggagaaaatgaaaagcagtgtggtgattcctcaaaaatctaaaaacacaactgccattgaacccagcaatcccattactgggtatatactcataggaatataaatcattctaccataaagacacattcatgtatgtgttctttgcaacactattcacaatagcaaagaaatggaatcaacctaaatgcctatcatcacagactggatacagaaaatgtggtacatgtatatcatggaatactattcagccatcaaaaagaacaagatcatgtcctttgtgggaatgtggatggagctagaggccatcatccttagcaaacttaagcaggaacagaaaaccaaatactgcatgttcttgcttataattgggagctaaatgatgagctcacatggacacaaagaggagacactagggcctacttgacagaggcaggtgggaggagggagaggatcagaaaaaaacagctattgggtactaggtttagtacacaggtgataaaataatctgtacaacaaactcccttcacacaacttcacctatgtaataaacctgtatgtgtactcctgaatctaaaagaaaagttaaaaacaaaaca

SEQ ID NO: 2759 - DNA, 232 bp, Homo sapiens
  source 1..232: mol_type = other DNA
ctcagttccattcttagtgaactggagtccacttccccaaacttccacccttgttggcagtttcagaagaatggccaaggactgaatgaatgagccaccctctcaccccagaggtgggccccccaggtcaaggtcgaggcacattggcagggcagtgtggggaaaagttgaattgctgctgtccatgttctacctgttctgtgaaaaaatggagggcttcagtctcttggcc

SEQ ID NO: 2760 - DNA, 1111 bp, Homo sapiens
  source 1..1111: mol_type = other DNA
ccattttctaataaaggaactagagatcattggaaaaacagctcattccaaggctagggaagggaaaacacaagatgagaacctggacaatcttgtagtctcagaaagtaaagatgtgcttaaaaagaaaaaaatggggcatgtcaaaaggacacagaagacacttataaaagatcccagtagccaaagctagaacaatatgaacaacataataaataacaatagtattggattataactcccaaagtatgtgtctgtattgataaaataaataatgtggagaagaaacaaatcttgtttatagaattcagttgttaaatatattagaagggatggagatatacaaaattcccattagaatagcaaatagtaataattactgtagacaagatttactgatgaattctaaaactggtgggcaaaactttaaagagaaaagaatatatctgcatagcctccaagtacttcttctaaaatacacctaattactgtggtggttttaacatatgaccacaaatttctttcatattctcccttttaggaggtggaatttaattctcctccccttgaatatgggctggacaaagagaaaaatggtagctcaacagtggagacacctggacagcactttaaccaagtgatcaaagttaatatcgccaattatgtatgtgctcccggatgtgatgttatgagaaaggcacactatacctctgtggaattcctccccaaaacctattatctcaatctatccatagaaaacactggacaaatgcaaactgagggatattctaaaagaaaacagatcactactcttcaaaagttacaaggccatcaaagacaaggaaacaaactttcacagactgaaggagactataattaaatgcgatatggtacccaaactggattatgtaagtaaaaaaactggggaaataaaatgtataattcagttaatggtattataccaatgtacttttatttttgataaatgtaccctggttatgtaatatactaagattagagaaagctggatgaagggtatccggaactctgtatttttaaaactcctttgtaagtttaaaattacttaaaaatatattaaaaatgtatattt

SEQ ID NO: 2761 - DNA, 230 bp, Homo sapiens
  source 1..230: mol_type = other DNA
gaaaaagtaaaacctctgtttggaggtaatattgggttgaattctgactgcccctttctagctggacctttaacaaatcacccaatcttttttgtgtttctctaaagtcatttatacattaaatgtaattatagcaactgtggggttctgttgagaattaagagctaacactatatatgtaaagtttccagtactagtcccagaatttagaatatgctcaacacaaagta

SEQ ID NO: 2762 - DNA, 153 bp, Homo sapiens
  source 1..153: mol_type = other DNA
tctaccacttcccagatcctttccagggtaccaccctattaagcattaatttcttcattttttaaatggggacaaaaatatctgctttattattaccacttacttatagaggtgatttacagatttaatgagaatatatcaaagtactttata

SEQ ID NO: 2763 - DNA, 1689 bp, Homo sapiens
  source 1..1689: mol_type = other DNA
agattggttaccagcttggccacagtggggtaaagcaccaagcatttctggacctaccctggtccagaggggagcccactgtcctgaagggagagactcaggactggcagcattcaccaaaagctgactgaagaagccttgggcctttagtaaacattggccgtagacaggcagtacttgctgtggccctggggcagtggtggccatgggaagggactgctctgcttgaggaaagaggaaggaagggtagggaggactttgtcttgtgacttggtcagctgcagtagaacacagcaccaggtggagtcccaagatggcatctctagacccacccggggctggggagaaaacttgccacccttaagggaaggacacaagcctgggtggatttgccacctgctgatgatagaacttttgggccttgaggagacacagacgatagccaggtagtggtcactgctggccttaggtgagaccagtgctgtgctgtcttcggatctgaccctgtgcagtcccagtggtccttgtgtcacgcctctcctagctccaagcagctcagtacagagggtgagactgtgtttccctgggggaaagtaagggaagagaacaggagtctctgactggtaatccagagaatgcttttggatcttacccgagactactgaggtcatacctctatgagtccacaaaagatgcagtgttactaaagttggggatatgactgcagtgaccaatgaattagatcacaacacccaagggtgtttcaatatctagaaagcattctcaagaaggactggtacaaattagtgcagatgcaaagactaataaataactaacttttcaatgtccagacacagacgaacatctatgagtataaagaacacccaggaacacatggcctcaccaaatggactaaatagggcaccaaagaccaatgccagagagacagggatgtgacctttcagacgcagaactgaaaatagctgttttgagaaagctcaatgaaatctaaggtaacacaagaaggaattcagaatcctatcagataaatttaatgaagaaattgaaacagttaaaaagaaacaagcagaaattctggagctgaaaaatgcaactgacattatgaagaatgcacaagatagagtctcttaacagcaggattaatcaaaaagaagaaaattactgagcttgaagacaggctatgtgaaaatatacctcagaagagacaaaagaaaaaagaataaaaagtaataaagcacacctaccagatcaaaaaaatagcctcaaaagggcaaacctaagatactggcctttaaggggaggaagagaaagagatcagcgtagaaagtatattcaaatggataataacagagaacttcccaaatctacagtaagatgccaatattcaagtacaagaaggttatagggcaccaagaaaatttaatccaaagaaaagtacctcaagacatttaataatcaaacacccaaagggagggaataaagaaaggattcaaaaagcagcaagagaaaagaaacaacatacaaaggagctccaatatgtctggtagcagacttctcaggggaaaccttacaggtgaggagtgagtggcatgacatatttaaagtgctgaaagaaaaaaacttttatcctagaatagtatatccagcaaatatatccttcaagatgaa

SEQ ID NO: 2764 - DNA, 1414 bp, Homo sapiens
  source 1..1414: mol_type = other DNA
tcattattctttcctctatgatcatcagcataaaaggatgatatttatccagtattttaaaaactttctttggaccccaatttttcccctggctacatcctgatttctttcctttccaagaaaaaacaagtcttagaagtctagctgaatttcactatctctaattttgctcctccatcttttcttgaaatcactccagtcagccagtggaccttaccattttactaaaatgactcttaccaaagtccaaaatgaccttcatatggcatgcttacattttagttttagtcttcgttgatctatcagcagcatttgacacagacggtcattctcttctttttgaaacactttcttaacatggctttcatgacaccaaaattcctcctacctttctgctcttcttaatctctttcattcatttgtgtttacctcctctacctctaaatgttggagttccccacagggattaattctaggataccttttttctatctacagtcatatccatcgtcgtgatttatttaatgctgtatataaatgacccctcaaatttatatgtcatcgcagtaaattgcaaatagattcttttagttgcttaagtcagacacctggaacgtatctttgaccttttctcatcactgcccttatccacatgccaaacattttgaggttctactttaaaaatatatctagaatccaaccacatttcaacacctccattgtcattacccttgtaaaagctacccttctcacttgcttggatttttgcagtggctttctgtctagtcttgtttttacccttgtgatccattgtcagtataaaagctagagtgctaaaatgtaaatcagaccatggcactcctctggttagtggttaacttcccatggcttcctatatctttttgactaacagccagcaatggatcttcaaataactacatggtctgaccacctgtcacctttctaaattcatttcctaccatttcacccttgcttgcttttcttctgaagtattaaccttttttttaaaaaatacctaaaatatattgggcacacccctacctcaggatatctgcatttgctattccttttgcctgtatagttttctgtcatatgtctgcatggcttcctctctcactttcttcatctagtttcccaaaagtcctccaatcaaaacttgtaagttcctgaaagctactgatcctcatttttgctttttattttttccttattccttactactgtcaaaagcatgttatgttttacctatcgtgtctgttttctcttctcactacgatatgaggtacttgaggacagggattatgtttttagtttattccctgctgtttttcaagtgcctagaatgatgcctgctgcatattaaatatgaataaatgtttatcaaataaatgaa

SEQ ID NO: 2765 - DNA, 478 bp, Homo sapiens
  source 1..478: mol_type = other DNA
gtgataggcagaataatggctctccaaaatgggcacacctcaatccttgtaatatgtgactatattaacttacatggcaatagggattttacagatacaataaatgtagggtgcctgagatgggaaattgtcctggattatctaagtgagcccagtataatccttttctgggtccttttttgggaaagaaaaagaaagttcagagttaagaggagatgtgaggacagaagcatactggagtgatgagattgctgactggaggccataagccaaggaacacagatagataggcaccagaagctgaaaaagaagaaactgattctttcctagaggctcaaaaaatacagttctgctgactccttgattttagtctaatgaaacccattttggacttctgacttccagataacaacatgtgtgttgtttgagccactatgttcttagtaatttgttaaagcagcaataagaaacctacaca

SEQ ID NO: 2766 - DNA, 199 bp, Homo sapiens
  source 1..199: mol_type = other DNA
aatataaactgtggactttgggtgataatgatatgtaggttcgtcagttgttaacaaatgtatccctctgttgggggctattgataatggggaaggctgtgcatgtgtgggagtaggaggtgtatgggacatctctgtaccttctaatcaattttgctatgaacttaaaactgctctaaaaataaagtttattaaaaaa

SEQ ID NO: 2767 - DNA, 559 bp, Homo sapiens
  source 1..559: mol_type = other DNA
tgtagtagctaacctccaagatagccaccatccgttctttctctccttgtatttgcaggctactctttttatcaagagagggagtctaattctcctcccttaaatgtgacctaaccttagtgtcttgcttgactaacagaaaacagaaatgactttctggggcttctaaaaataggtcttaagaagccacataggcagggtctcatagaaaacccattcttgggatactccttagaaccagctgcttcatgtgaaaattgaaactatacagaaaccacatgtagagattctaacggacagccccaactgagctcacagccactagaaagcatcgtcttccagccatgtgagtgagccattttggacatctggtccagttgagcctttgggtgactccagccccagctgccatctgattgcaactgcgtaagaggcctcaatagagaatcacccaactgagcaacccagtcatcccacagaaccatgaatgatgaatttttaaaatgttacttgagacactacattttggggtagtttattacacagcaaaagataactg

SEQ ID NO: 2768 - DNA, 620 bp, Homo sapiens
  source 1..620: mol_type = other DNA
tggtgggaatgtaaaatggtacagctgctctagaaacagtttggccatttcttataaaatccaacatacacttgctgtatgacccagaaattccactccaagatatttatccgagagaagtaaacacatgtctgtaaaaagacgacttgttcacaaatattcatagcagctttatttccaatagccccaaactggaacgaacctttatattcaatgacaggtaaatggataaagaaattgcaatgtcatagtacagtgggatactacactgcaataaaaaggaatgatctatgcgcaacagtgtggatgaacctctaaaacgtcatgctgagtgaaagaagccagacacaaaaagggcacatactgggtgattcccttttaatgcaatttggaaaagacaaatcgctagtgacagagcagattagtagttacctggagttgggagtggtggggagattggctgcaaaggtgtgtgaaggaacttccttgggggatggaattgttctctatctggattgtggtaattatgcatgcacctgtcaaaacccgttgaactctattcctaaaagggatgcattttgttgtatgtaaattatatcttaataaaatttattttaata

SEQ ID NO: 2769 - DNA, 118 bp, Homo sapiens
  source 1..118: mol_type = other DNA
tgtgtttatagcaaagccgacttggaaatatgcaatggaatgcaaaatccacatggacttctaaggtaaataaaaaatattagaaaaagaaaagttttgctttgggcaagctgctgct

SEQ ID NO: 2770 - DNA, 322 bp, Homo sapiens
  source 1..322: mol_type = other DNA
caggggtcgcaaacgggtagtcctggggccctgcgcattccacacatgtgctttgtttggtctgcagagtcttaccaaagtcaggacagttcaaataacaatccggagttatgcgtcctcttgaaaaagccgaagacccggcggctctggtcccgcttccccccatggcgacgaacagctggcactgagtagcagctgcccccatagtttggggcccacattcctctgtcccacctccctgccattgctttttgcctctccccagactgcttcagccgctaacctaacctggcccctgtgggcatttgagtttgcgacccct

SEQ ID NO: 2771 - DNA, 187 bp, Homo sapiens
  source 1..187: mol_type = other DNA
agtggttagacacaggctcgacagtcagacaaacacattgaatgatgttgctgccacttgagagagcaggcgagatgtggctcttaactctcagctgtggcttcctcagcaaaatggggttgatattaagtgaggaataataataagaaactgcccacaaagtacttggcaccagcactcaatacac

SEQ ID NO: 2772 - DNA, 298 bp, Homo sapiens
  source 1..298: mol_type = other DNA
gccgggcgcggtggctcacgcctgtaatcccagcactttgagaggctgaggcgggcggatcacgaggtcaggagatcgagaccaacctggctagcacggtgaaaccccgtctctactaaaaatacaaaaaattagccgggcgtggtggcaggcccctgtagtcccagctactcgggaggctgaggcaggagaatggcgggaacccgggaggcggagcttgcggtgagccgagatcgcgccactgcactccagcctgggcgacagagagcgactccatctcaagaaaaagaaaaagaaa

SEQ ID NO: 2773 - DNA, 187 bp, Homo sapiens
  source 1..187: mol_type = other DNA
agtggctttaaaccaggggcaggttgtccctccaggcagcattggaaatgtgtgtgtgttgagggggtcacagtgactgtgggggcacccctggcatctagtgggcatcccacaatgtgcagaacagtctctgacagcaaagaattggtccattcaatgccaattgtagtacctttgagacattctg

SEQ ID NO: 2774 - DNA, 232 bp, Homo sapiens
  source 1..232: mol_type = other DNA
agtgatactgcagagggattagaaacatgggcttcctgtccacgttgaagtcccgtctccagtgcttcctagctgtgtgaccttggaaagatccttaatctcacccagcctcagttttcttttatgaaattggaagaagcagtagtggctatctagggtggttgtgagggtgaaaacagataacctccataaacccacattacagtggcctggggaagtgctttgcaaaggg

SEQ ID NO: 2775 - DNA, 1152 bp, Homo sapiens
  source 1..1152: mol_type = other DNA
catgtatgatctgttcctgcttggacatggggtagggcatcccttccacctctgaactcatcacctctcatcttccaagggactctgcttccgcggacaccctctctcctgtcccagcggtttctcccaggtattggatcactcccttcagcttacatacctgctcggccatcgctcagcccaacaccatggccctctgcagtttccacctctccttctattctccttctcaccacacgttccaggacactcgtctgtcctcagctaccacccacattctcttcaaccctctcccatgtgtcatcagcccagcaccctccaacactgctctcatccacttcagtcccaggagcaccccttggttcccgtggtaatcttcatagtgggagacctgctgactccacatcttgcttgaaaccctctctcctctgggcttctctgaagacacacacaggtttttcctgctgctctctggctgccccctgtgtcatcctcctttaccagcagacctcagacgatagatgtggcccagaactcagctctctcctgtcctccctgcactcctcttgaaataggcctgaccattcctctagactcagaagatacccaaattcacatccccagccatgactcctctctcctcattgaacgcaggtaagcagctacctgctcggaggggagttgggcggctcatgctcagcatatttgaagaactccagctttcatccagagcgtctgtttctcacccaccttttcaccatctatcctcccagtagttcaaaacacacccaaagcatcacttgcacaccctccctcggcctcacctcacagtctgttcatttgcttggttccctccacttgacctccaagaataccagctgggtttgtcctgtacctccacctcctctgtgttcccctggtccttctgctgcgtcggtcctaactcatctctggcctgtcattcttacttcccaaaagtcctctctctctgcagccaaattcaccttttaaaaaaacaaaacatgagccagattgccactccccacacccactccagtggcttcccactgccagtggaatagattcccaattcttgatttctggctgacaaggccccagctggtctgacccctgttttttgaccgcctctcc

SEQ ID NO: 2776 - DNA, 321 bp, Homo sapiens
  source 1..321: mol_type = other DNA
gccgggcgccgtggcacacgcctgtaatcccagcactctgggaggccaaggcaagtggatggcttgagtccaggagttttgataccagcctggggaatatagtgaaaccccgtctgtcctaaaaatacaaaaaattagctgggcatggttgcgtgtgcctctaatcccagctacctgggaggctgaggtggggagaatcacctgagcccagaaagtcaaggctgcagtgagctaagattgcgcgactgcactctagcctgagcaaccaaagtgagaccctgtctcaaaaggaaagcataactgcaaaaaaaaaaaaaaaaa

SEQ ID NO: 2777 - DNA, 231 bp, Homo sapiens
  source 1..231: mol_type = other DNA
agacacaatgacaaaatagattgtgtccacagaaagatcgagagtgaaatttccagaaactatcttagatgaaataattgaagaattcagttaaatatttattgaacaaatgcagagtaaatgaactaagggctgttataaccttaagttacaacaaacaacttcaaatattcagagggctgtcacacagagaatgaaagacttgctcagtatttctccaaagggcagaac

SEQ ID NO: 2778 - DNA, 56 bp, Homo sapiens
  source 1..56: mol_type = other DNA
tactggaaaaggcaaacttgcaaaagaaatagcagagaaactaggtatgattttat

SEQ ID NO: 2779 - DNA, 1787 bp, Homo sapiens
  source 1..1787: mol_type = other DNA
aggtctgagttttaaaaggcaaacaattaatctttaaaaggatatgattttatatatatatagaaaaccccaaagaatgtatgacaagaataggagagtttggcaagatggttggctataaggtcagtatgcaaaggtcaaataaatatctatactccagtaataaataatcaggaaaagtaacttttaaagtatatactagtatcaaactatataatagtatcaaactataaaatacctaggaataagtctgaattccatataaaactttactgaaagatattaaataagtcataatgtcatatatggagagacatcccatgtccatggatatagacttactatcctaaagatgtcaattttcacaaaaatggtcaatggattgaatgcacacccagtcatcattatctcaaaggccttttccatagagtgtgactagatttgaaggtgtatatgtggaagaaaaaaggccaagggtagcaatgatacttctgaagatgaagagtaaaggaaaggaactttgccaatcagttccaggacttacaaagttagagtgaacacagggcagtattggcacagatgtatcaaattgacgccgccagaattctacttttatatgtggaattttgatactgacagtgggggaaaaagggactttttagcatgaagagatgaaaaatccagtttacccatatgcataaaaaatgaaattgtagcccaacttctcacacacacacagtctaacagattaatgacctacaggtcaaaagcaaaactttacatctttgtgaaaaaaatatacatgaataactttctaactttggtgtggggaaggatattttttaaagaaggctcccaacttgttaaccactaatgcttgataaatttgattatgaacttttctctattaggaagtaccaccaagaacagggaaggacaagccagaggctggaggaagatacctgcagaacacagacctgacaaaggatcagtatcaaaacatataagaattttgacaaatgaataaaaagagtacaaataacccaacataaagtcaaaaggcgtgatcaggcatttcacagaagcaaacacctttggtggatgcccatgaggagaggcgcagtcacatcagtgcccaggagatgcaaacccagatcccaggggtgtgcatcccacccgttctgcctgtaggatctgcaaacccggcaaaacctagttctagagagactggattcactgcatgtcttcatcactgctggagggagcgcagactgctatcgcctcttagaaaatgacttagttctcatgtaatttgggcattcacacatcctcatcctagatccagcttttccactcccgcacacgtactggaaaacctgtacaggaacatccactgcagcactgctcataccaaacacaacctacatgttctctgcacagagaggggagaagagccggtcagttcactcagtggactctgtgctcaatagtaggtgtgaataagccgcagccgcccagaccgcatgggccaacctcagtccgagaatgcggagtgaaaacacaggtctaacgatcacacatggcaagataattatcttgcaaagaaaactcacttattgttctgccatacatatatgtaccatagaatcactccccgcaccttccactctgaaaaaacaaaggaattctaggcacaaagttcaggatcatggttaactgaggggagagaacagggagtatgatggcaagatagaaggtatcgttcacatccaagtttataggttggg

SEQ ID NO: 2780 - DNA, 533 bp, Homo sapiens
  source 1..533: mol_type = other DNA
ggtgagaaattccaagcaataggaattttctctgaagatcacttggaagtgccccatgagaaaaaccactagcttcaaacccctgccaagcccagagaatgccttacactgaaatagatcatcataaaattaataggtaagaactttcctacccacccattatttctctttcctccctcccactgtggactctgaagatatcagaaatcacagtggcaagaaacaggggtaaggaataggagagtaagaagggaaagagagaagacatctacctccctcttctttcttatagctccagcttcagcagccccaaacgcggggagggagaccttaaatgaagattgaagctttggtcattatgttatacgagactggccatattagttactgaacagactgtcttcataaccagaggctgtttattatctgagaatgcccagggcaggagaagaaccaaccccaacagaacaggtttaaatggacagtgaggggaagagttcatttgctctaaaatcacaccctacaaatcctcc

SEQ ID NO: 2781 - DNA, 152 bp, Homo sapiens
  source 1..152: mol_type = other DNA
tgcaatgaagaactcttcactaggagttagtagacttaggctccagtcttatttctactacatatggccatgggtaaaatcactctctctgattcgtaggcagtttcttcaccgcttaagtgagctgaggtgtgaacgaccagatagataat

SEQ ID NO: 2782 - DNA, 300 bp, Homo sapiens
  source 1..300: mol_type = other DNA
gccgggtgcggtggctcacgcctgtaatcccagcactttgggaggccaaggcgggtggatcatggagtcaggagatcgagaccatcctggctaacacggtgaaaccccgtctctactaaaaatacaaaaattacccaggcgtggtggcgggcgcctgtagtcccagctactgaggaggctgaggcaggagaatagcgtgaacccgggaggcggagcttgcagtgagccaagatcacgccactgcacttcagcctggacgacagagtgagactccatctcaaaaaacagacaaacaaaaaa

SEQ ID NO: 2783 - DNA, 32 bp, Homo sapiens
  source 1..32: mol_type = other DNA
cacatactaggcactccataaatatctgttga

SEQ ID NO: 2784 - DNA, 33 bp, Homo sapiens
  source 1..33: mol_type = other DNA
tcatgtttcccttttccttggctgctaatagaa

SEQ ID NO: 2785 - DNA, 177 bp, Homo sapiens
  source 1..177: mol_type = other DNA
cctcctttgtgcttccagtaccccaggtccatatacctctagaacagtacttaccatgtttcatattgaaatattctgcttctgtttctcttcctcacttcagggcaaggatctcacattatcagtctttgaccgacacagaatgcctggcatttgataaatgtttgttgaacttga

SEQ ID NO: 2786 - DNA, 473 bp, Homo sapiens
  source 1..473: mol_type = other DNA
ggaagaaagtgttggtggaagctaaaaagaaaagatggattgttttattcacaagaatttctctccagaaaccttacaactgcagaagggattggggtcctattgttagcctccttaagcagaataaacattagtcaagaattttgtatccaacaaaactaagtttcatgaatgaaagagaaataaagtctttttcagacaagcacatgctgagggaatttgtcactaccagaccagacctacaagaaatgcaaaaaggagttctaaatcttaaaacaaaaggttggcatgcaccagaatagaacctcttgaaagcataaaactcacagggcctataaaacaataatgtaatgaaggaagaaaagtatctaggtaacaatcaacatgatgactgtaacagtacctcacatctcaatattaacattcaatgtaaatggtctaaatactccactcaaaaaaaaaaaaaaaatcac

SEQ ID NO: 2787 - DNA, 683 bp, Homo sapiens
  source 1..683: mol_type = other DNA
tattcccaatttaacacctcacaagtttgggggtggaggggctagacacaagccaattttaaaacatttgaaagttcaaaaggaaaatctaaagaacaaaattgggatgtttatattactagataccgagactttataaaaagccatagtaattaagacattgtggtattgatgcaaaaatagacaaatggggtaatgagctatatagtggctaaaaacagacctgttcctgtatggtcacctgatttttctacaaagctgccattgcggttcagtggggaaaaggatgatctttatgataaatggtgctgaatcaactgggtatctgcttagataaaaaccttgacctttacatcaaaccatacacaaaattaatttgagatgggttatagaatgaagtgggctaaaacaataaaatatctggaaggaaacataaggaaatatgtttagagaaggcaagaatttcttgaataagatgcaaaaggccttaaccaaaaaaagattgactaagattttttaagatttaaattcattaaagaacttctgttcatcaaaagatagcatgaagagatggaaaaagtccagttttaaagaatgaacaaaagacttaaaacgaacttgtccaaaaaaaaaaaaaaagataacctaaagggtctattaggcacatgaaaaagatactcaat

SEQ ID NO: 2788 - DNA, 120 bp, Homo sapiens
  source 1..120: mol_type = other DNA
aagccttaacatgcattgctttaattttgcccagggacaaattttaataatcagcaagactggtttgtgcaaagcgttgagtcatcaggtatttagagcctagccagctacccagtatcc

SEQ ID NO: 2789 - DNA, 1045 bp, Homo sapiens
  source 1..1045: mol_type = other DNA
atggtgttattcactgtgcacttgtaataaaaatgtcggtttcattttaaaatgcccttgacgttgcagtaaaaattattaattttattaaaattttaacccatgaatacacatcttttattctgagatgaatgatacatatgcatagagtacttctgtggcatgccaaagtaccatgcttgtttcagggagatgtgaagttcagttacaagctgaactacttgcttgtttcttggaataccatttttatttgcagtaatgactgacagacaaactacgcccatttgcactgcgttatttgacagttgttttttgaaaagtgaatgagaaacatctcccatagtgagcttgatagcttcccagtatgtagacttttctcatggagtctgatattagagagtgtaattttccaatactggataatgaaatgtgtcaacatttggaatatttgtatacagtggtgaaccaatattttccaaatgatcaatgcatgatgtttcaccagtatgcatgggtaaagttctttaaaagtataaaatatatcagttgatcttaatgtaacagagtttgagaagttcattggtaagatttcagataccacattgtaacctttaagaaattaccacttgtcaagtttttgaatatgcaagcattttaaaatattctttttccaactacatatttgtgttgggtcagatgttttcacccacttctgctaaaacaacattttataacacgtcgaatacggaggcaggtaggagaatccaagtatcctctgatacttcacattttaaagagatttttaaataggtaaaacattgtcacttttttcattaaattatttttttcttcagaaaacagttatttttcatcaaattatgctattttaacatttaatgggtttattattaaatgaattaatatttaaatttcacaccttgaaatttctactatggtaaataccagtaaaacaaggaaacaaaagctcttcagggtgcttaatattttaaagatatgtagagggatcttagaattgagaactgtt

SEQ ID NO: 2790 - DNA, 519 bp, Homo sapiens
  source 1..519: mol_type = other DNA
gagttactgtataatccagccattctcctaggaatatacatccaagagaaatgaaaacaagtccacataagatttgtacacaaaagttcatagtagcattattcatggtagccaaaaagtacaaacaacccaaatgtccatcagctgatgaatggatacataaaatgcgacatatccatatgatagaatattatttggcaataaaaaggaatgagatgctgattcatgccacagctgggatgcaccttgaaaatatactcagtgaaaaagaccacatgtatgattccatttatatgaaatgtctagcatgggcaaatctatagagatggagagtagattagtggttacctagagttgtgagaaaacagagtgaatactaacgggcatagggtttcttttgggggtgagaaaaatgatagttgcacaactctgaatatagtaaacactactgaattgtatactgtataggtgaattgtatggcatgtgaattatatctcaataaagcagttattaaaaaa

SEQ ID NO: 2791 - DNA, 340 bp, Homo sapiens
  source 1..340: mol_type = other DNA
ccaggcatggtggctcacaccagtaatctcagcactttgggaggccgaggcaggcgggtcacttgaggtcaggagttcgagaccagcctggccaacatggtgaaaccctgtttctactaaaaatacaaaaattagctgggcgtggtggtgcatgcctgtaatcccagctacttgggaggctaaggtaggagaattacttgaacatgggagatggaggttgcagtgagccaagatcatgccactgcattccaacctgggcaagggagtgagacgctgtctcaaaaaaaaaaaaaaaaaaaaaaaaaaaaaaaaaaaaaaaaaaaaaaaagaataaataaaa

SEQ ID NO: 2792 - DNA, 304 bp, Homo sapiens
  source 1..304: mol_type = other DNA
ggctgggcgcagtggctcacgcctgtaatcccagcactttgggaggccaaggcaggtagatcacaaggtcaagagatcaagaccatcctggccaacatgatgaaaccccatctctactaaaaatacaaaaattagcttggcgtggtggcatgcacttgtaggcccagctacttgggaggctgaggcaggagaatcgcttgaacccagaaggcagaggttgcagtgagccgagatcacgcccctgtactccagcctggcgacaaagcgagactctgtctcaaaaaaaaaaaaaaaaaaatcaaaa

SEQ ID NO: 2793 - DNA, 49 bp, Homo sapiens
  source 1..49: mol_type = other DNA
atcagcctgggcaacacaatgagaccccatctctacaaaaaatcaaaaa

SEQ ID NO: 2794 - DNA, 58 bp, Homo sapiens
  source 1..58: mol_type = other DNA
cagctgggcactgtggtacacaatggcagtcccagctactcaggaggctaaggcagga

SEQ ID NO: 2795 - DNA, 206 bp, Homo sapiens
  source 1..206: mol_type = other DNA
aatagcagacaaaatatagttcaatatgaaaagcattatatgagacaaaggcaattttcaaaaattgataaaacattccaccaaaaatcatgactacgcatctaacagcttcaaaatatagaaaatactcaaatgcaaaatcaacaaatctgcaattacagaaaaagacttcaacatacttttagaaagtagtaactcaagtagac

SEQ ID NO: 2796 - DNA, 70 bp, Homo sapiens
  source 1..70: mol_type = other DNA
aggtaatgcatgaaagcacatgtttcagtgccactcacataagaagtgcccggtaagtgttagctattat

SEQ ID NO: 2797 - DNA, 101 bp, Homo sapiens
  source 1..101: mol_type = other DNA
cagctcttatgaagaataatttggcattatgtatcaagtgcccatactctttgacaaagtaactgtctttctgataatctatcttaagtaatacaaaaatg

SEQ ID NO: 2798 - DNA, 1725 bp, Homo sapiens
  source 1..1725: mol_type = other DNA
gagatttccacctctaccatacccaaataactggtattggctgtacctttctaatgtgagcaactttaaaattgaacagaatatatgaaacctctcttttcagacattgaacagcatgtagcacagcaccgtgattcctgaaagtagggaacaaatggggcaaaccctatcactctaactttctgctgaaaaatgctgtctaaattgcagcacaatgagggggaacccaagcagagcatagtggtcttgctgagttgaggagatagttgagcagacttttcaaggcagagtatcagaaaggagagaatataacagcaaaacaggctcctggaatccctgtgaatctgttgctgaatactaagctgcacatgcataaggtgaaacttcacagtgcgatgcaaagaactactgcggagctgtgagctgattggttcccagggctcactgggcaatgtttgagtttcaactcgccaatgtgaagaaaccttgctgactgtccagggaattcagtagaaatcccaaaagggtaaggcattaggagaagggctaactaagccgaaaagtgaggtaactctagacttcctccaacaaggtttagaaagcagcctcaaaaagaggaagttcatccgctactaccgtaactgccagccaaaacaaattttaccatttttaaaacaacaaaatacagacatttaacaacattaaattcagaatgttaaaaatactagatatgcaaataagtaggcaaatagaacccaaaatcaggagaaaaatcatttaatagaaacaaaccccaaaatgacagagataataacgttagcagacaaggacttaaaaaattaaaataaaacaaggatttaaaggaaaacatgaacatagtgaagaaaaaactggaagatatagaaaataaccaaatggaacttctggagctaaaaaatacaacacctgtaatgaataattcagtggctgaacttaacagtaggttagacattgtggaatgaaatatctgtgacactgaagacatagcaatagaaactgtcccaattaaagcagagagaaaggaaacaaaagaaacacagaaacacagagcctcagtcaccttaagatgatattaaaaactggagtcctcgaaaaggattaacggtgatgatttgaaggccaaaaacaagtcccaaatttcatgaaaattgtaaacgtatagcgccaagaagctcaacaaatccaaagtaggagaaaaacaaagcaaaccatatcaagcgaggcactttgtaattaaatcactgaaaaccagtaataagtagaaaaaaattaaaagcagaaagagaaaaaaagacacattttatacagggaacaaagacagatataattgcagacttctcttcagaaataatgcaaactagaacttaatgaaatcgcgtctttaaagtgataaaagaaaaagaaagcactgtcaatctagaattctatatccaccagaaatattctgtaaaattgaaggtaaaataaatgtttgtcagacaacaaaaggcttaaagttttttttaaaccagaagatcttcaatacaagaaatacaaaataaagttcccgaggcagaaaaaacatggtaccacatgaaaccactgacctacacaaagaaatgaagagcaccagaaatggtaaatatatgggtaaatatgagacatttctttctctgttacaaaattcctttaaaacataattgacct

SEQ ID NO: 2799 - DNA, 887 bp, Homo sapiens
  source 1..887: mol_type = other DNA
tacacacacacaaacaaaaacccattaaaaaaatgccaaaagacttgaacagacacttctcaaaagacaacatacaagcggttaacaaacatgaaaaaatgctcaacattactaatcagataaatgcaaatcaaaaccacaatgagttacaatctcacaccagtcagaatggctattatcaaaaagtcaaaaaaataacagatgctggtgaggctgtgggaaaaacggaatgcttcaacactgtagaagccagtgcagtgtagaatgcgcctacactgatggaaatgcaaattagttcagccactgtgaaagcagtttggagatttctcaaagaagttaaaacagaactaccatttgaaccagcaatcccatgactggatataaatccaaatgaaaataaattgttctaccaaaaagacacatacactcacatattcatcacagcactattcacaacagcaaagacacagaatcaacctagatgctcattaatagtggactggataaagaaaattggtacatatacaccacagaatactatgcagccataaaaaagaatgaaaatcatgtcttttgcagcaacatggatgcagctggaggtcattatagtgaatatacacaggaacagaaaaccaaagaccgcatgttctcacttatcagtgggaactaagcaatgggtacacatggacataaaaatgagaacagacataggggactactggagggaagaggggagggaaggggtgaaaaaccacctgttggactctatgctcactacctgggtgacaggatcatttgtaccccaaacctcagcatcacaaaatatacccatataactcacctgcacatgtacccctacatctaaaataaaagttgaaattataaaa

SEQ ID NO: 2800 - DNA, 308 bp, Homo sapiens
  source 1..308: mol_type = other DNA
gatttaaatgtaagacttcaagctataagagtcctagaagaaaacctacgaaataacatctggacatcagctatgggaaagaacttacggctaagtcctcaaaagcaattgcaacaaaaacaaaaattgacaagtggaacctaatcaaactaaagagcttctgcaccgcaaaaggaactatcaatacagtaaacagacaacctacagaatgggagagaatattcacaaactgtgcatctgaaaaaggtctaatgtccaaaatctataaggaactaaaacaattcagaaaacgaaaaccaagtaactcg

SEQ ID NO: 2801 - DNA, 350 bp, Homo sapiens
  source 1..350: mol_type = other DNA
gatatggtttggttgtgtccccccacaaatctcaacttgaattgtatctcccagaattcccacgtgttgtgggacagacccagggggaggtaattgaatcatgggggccagtctttcccgtgctattctcgtgacagtgaataagtctcatgagatctgatcagtttatcaggggtttctgcttttgcttcttcctcattttttcttgccacaatgtaagaagtgtcttttgcctcccaccatgattctgaggcctccccagccatgtggaactttaagtccaattaaaccactttttcttcccagtctcgggtatgtctttatcagcagcgtgaaaacggactaataca

SEQ ID NO: 2802 - DNA, 1515 bp, Homo sapiens
  source 1..1515: mol_type = other DNA
taaattggtaccagtagattgggacctgctgaagaaatacccaaaatgtggaagtgactttggaactgggtaacaggcagaggctggaacagtttggagggctcagaagaaaacaggaaaatgtgggaaagtttggaacttcctacagacttgttgaatggctttgccccaaatgctgatagcaatatggacaacaaagtccaggctgaggtggcctcagatgaagatgaggaacttgttgggaactggagtaaaggtgactcttgttatgttttagcaaagagactggcagcattttgccccttccatagggatttgtggaactttgaacttgagagagatgatttaggttaactagcggaagaaatttctaagcagcaaagtgttcaacaggtgacttgggtgcttttaaaggcattcccttataaataagggaagcaaagcataaaagtttggaaatttgcagcctgactatgcaatagaaaagaaaaacccattttctggggagaaattcaagccagctgcagaaatttgcataagtagcaaggagcctaatgttaatccccaacaccatggggaaaatgtctccaggccatgtcagggcagcccctgacatgtgtgtgcagcctagggacttggtgtcttgtgtcccagccactccagccatggctgaaaggggccaacatacagctcgggctgtggcttcagagtggaagccccaagccttggcagcttctatgtgctgttaagcctgcaggtgcacagaagtcaagaattgagatttggaaacctccgcctagttttcagaagatgtatggaaatgcctcaatgcccaggcaaacgtttgctgcaggggagaggccctctcagcggcaggggagagaacctctgctagggcagtgcagaagggaaatgtggtgtgggagcccccacacagagtccctactggggcactgcctagtggagctgtgagaagagggccaccgtcctccagaccccagaatggtagatccaccaacagcttgcaccgtgcacctggaaaagccgcaggcactgaacaacagccgtgaaagcagccaggagggaggctgtaccctacaaagccacaggggcagagctgcccaagaccatgggaacccacttcttgcatcagtatgacctggatgtgagacctggagtcaaaggagattattctggaactttaaaatttgacagccctgctggatttcggacttgcatgggccctgtaacccctttattttggccaatttctcccatttggaacagccgtctttaatcaatacctgtacccctgttggtatctaggaagtaactagcttgcttttgattttacaggctcataggtggaagggacttgccttgtctcagatgagactttggactgtggatttttgcgttaatgctgaaaagagttaagactttgggggactgttaggaaggcatgattggttttgaatagtgaggacatgagatttggaggggccaggggtagaa

SEQ ID NO: 2803 - DNA, 350 bp, Homo sapiens
  source 1..350: mol_type = other DNA
gatatggtttggctatgtccccacccaaatctcaacttgaaattgtatctaccagaattcccacgtgttgtgggagagacccaaggggaggtaattgaatcatgggggccagtctttcccatgctattcttgtgatagtgaataagtttcacaagatctgatggcttatcaggggtttccacttttgcttcttcctcattttctcttgctgccatgtaagaagtgcctttcacctcccgccatgattctgaggcctccccagccatgtggaactgtaagtccaagtaaacctctttttcttcccagtctcgggtacgtctttatcagcagcattaatacagactaataca

SEQ ID NO: 2804 - DNA, 186 bp, Homo sapiens
  source 1..186: mol_type = other DNA
gcatgcgtggcgtggggggaaagcatcaagttctgagtcacaggccagtatcccagccctgccatttaatagctgtgtgaccttggacgtggtactcctcctctcagtcaacttcatttgtagcacaagaataacaatacttaccttgcagggttgttgtgcaaagtgagatgctatgtacaaagc

SEQ ID NO: 2805 - DNA, 41 bp, Homo sapiens
  source 1..41: mol_type = other DNA
catatcattgttaccaaagagaatgtcttcaaactgagaga

SEQ ID NO: 2806 - DNA, 302 bp, Homo sapiens
  source 1..302: mol_type = other DNA
ttttttttaagagatggagtcttgctctgttccccaggggagtgtagtggcatgatctcagctctctgcaacctccacctcctgggttcaagcaattctcctgccttagcttcccaagttagctgggactacaggcatgcaccaccacacccagctaatttttgtatttatagtagtgacgggtttcactctatgttggccagggtggtcttgaactactgacctcaagtgatctgcccgccttggcctcccaacgtgctgggtgtcgtggttcatgcctgtaatcccagcactttggaggg

SEQ ID NO: 2807 - DNA, 88 bp, Homo sapiens
  source 1..88: mol_type = other DNA
gaagtggctcctatatgaagacacagtgatgatgacaagaagcaattgctctcttaataagggagaaggatttaaaatattagttaca

SEQ ID NO: 2808 - DNA, 295 bp, Homo sapiens
  source 1..295: mol_type = other DNA
gccaggcgcagtggcttaagcctgtaattccagcactttgggaggccgaggtgggcggatcacgaggtcaggagatcgagaccatcctggctaacacggtcaaaccccgtctctactaaaaatacaaaaaattagccgggcacagtggcgggctcctgtagtcctagctactcaggaggctgagacaggataatggtgtgaacccgggaggcagactgtgcagtgaaccaagatcaagccactgcactccagcctgggtgacagagcaagactccgtctcaaaaaaaaaaaaaaa

SEQ ID NO: 2809 - DNA, 335 bp, Homo sapiens
  source 1..335: mol_type = other DNA
caggttgagcatccctaatctgaaaatctgaaatctgaagtgctccaaaatccaaagatttgagcacccacttgatgccaaaagtggaaaatcccacacttgacctaatgtgatgagttgcggtcaaaatacaagcacacaatacacagtttattcagcattctttagggggaagaaaaccctcccagtcatcctcatttgtgatatatcttttctgctcatgcccagatttcccatgtgaacattatgtataggcaaatattctgaaatccaaaaaaaccaaaaatttgaaacacttcttatcccaagaatttcagataaggaatactcaacct

SEQ ID NO: 2810 - DNA, 223 bp, Homo sapiens
  source 1..223: mol_type = other DNA
tcaaaatgctacaggagattccaaactgcttgctacaaaaaaaaaaaaaaaaaaatccttagctttgactataagtagatctctagttcttctccatacaggagatatgtggtcttccatcccagggagaataatggttaggtttctcaactctcataacagaatgtcaacatcaccatctgctcatctggctttcaaaggatgcatatgggctcatcttctc

SEQ ID NO: 2811 - DNA, 137 bp, Homo sapiens
  source 1..137: mol_type = other DNA
agaataattggtacgtgatctcagaaaatctgaatttgaaggacgccaataacaaactagataaccactggcaaattagtaaacctctttgatcctcagtttactcatttgtaaaataaactatctgtattagataa

SEQ ID NO: 2812 - DNA, 93 bp, Homo sapiens
  source 1..93: mol_type = other DNA
cagtgtttctaaaggcgtgcactaaggaccatctgcctcagcaccacaaaggctcctattacaatgatgcacccctgagccccaactcagacc

SEQ ID NO: 2813 - DNA, 552 bp, Homo sapiens
  source 1..552: mol_type = other DNA
gtcaagattacatggaagcaacctgggtgtccatcaactgataaatggattaaaaaaatgtggtatatatgcataatgaaatactattcagccttaaaaggggaggaaatcctgtcatttttgacaacttggatgaaatcgggggacactatgctaagtgaaataagctaggtgtaaaaggacaaatactgcatgatctcacttacgggtggaatctaaaaaaggtgaagtcataaagagtagaatggtggttaccagaggctggaggtggggagttggatggcaaaaggggaatgttgattaaagagtacaaagtttccatagatagaagaaataagctttagtgatttactgtacagaatgctgactataataaatcataatgcactgtatatttcaaaattgctaagggggtagattttaaatgtttttaccacaaaaaaatggtaagtatatgaagcattggatttgttaattaccctgatttaatcatacatcaaaacaacacattgtaccctataaataagtaaaattattatttgtcgattaaaa

SEQ ID NO: 2814 - DNA, 376 bp, Homo sapiens
  source 1..376: mol_type = other DNA
gatatggtttggctgtgtccccatccaaatctcatcttgacttacagttcccatgatccccatgtgtcatgggagggaccagtggagatagttgcatcacaggggcagtttcccccatctgtcctcgtgacagtgagttagttctcatgagatctgatggttttataaggggcttctcctttcattgaacactcattcttcttctcgttacagccatgtgaagaagtacatgtttgcttccccttctgtcatgattgtaagtttcctgaggcctccagagccatgctgaactgtaagtcaattaaacctctttttttaaataaattacccagtcccatgtatgtttttattagcagtgtgagaatggactaataca

SEQ ID NO: 2815 - DNA, 1889 bp, Homo sapiens
  source 1..1889: mol_type = other DNA
taacataagagaagagcaattggatgtgtctagacccctttgtccttcctatctaatatagggcagagataaaaagctaagaaatgcttctgaaggtcacagcatagggactctggcttattaaaaatgtggagatttaatcataatattatagaatgcttttcttaataccacatcaccatctcaacagagctaatgtatgataacagtgaaatacaattaagagacctgcaagatacagactctgtttaagaagtagtttctagaaaaattcaaagaaagcaagacaaaagcaggacattagaaattgtagcttctgtcatctatagctacagcaaacattaagtgaacctaagttctactagttaacaataaaagcacatactacaggccttgttatttgagtttctattacccaatacatcatttcccttttttagcaacaacaacaaagaaattgaaaagcattgtaaagggtcagacaaaaaaaaacaacaatatgaagagacaaagcaaacgtccgaagcaagttcatatctgacaatacttgtgaatattagacagagaattcaatatcaggatggttaaaatgctaagtgctaatttaaaaaagcagaaaaaacatgccagaacacatgggtcatgtaagcaaagagatggaaattctaaaacatgatcaaaagaaaatgctagaaataataaaattgggtaacaaaaatggagaatgcttgtgatgggctcacaagtagactagacacagctaaagaaaaatcaatgaacttgaacatatgtcaataaaaacatctcaaactgaaatgcataaagaaaacaaaatgaaaaaaatcccagaatatacatgaaaagagcaaaacgagtaggaggagtatttgaagtaatagctgaacattttcaaaaaattaatgaaagataccaaaccacagatccaggaaactaagagaaaattaagcatgataaatatcaaaaagcctacacataggcatatcatattcaaaatgcagaaagcaacaaagagaaaaacttgaaagaagttgaagaataaacacatcctatctatagagtagaagggctaataatttaataggattttttttttcaaaagtcatgcaagtaggaaaacagtaaagaaaaagaaaaaccaaccaaccaacaaacctgaggagttttgtcatctataaatatgacttgcaagaaatgccaaaagaactttttcagagagaagaaaaattatatagtttaaaaacttggactatgtaaacaaaggaagagtgttagagaataaataaatgagagttaaaagaaaacctattatttttctgatttctagttgatttaatagaaaactgcttaaaatattaatggtaacaatttattgggtgattataggtatgaataagtgaaatgtctgtaagcagtattataaaagataaaagagatagattgggagtactttgttataaggtgcctctattacctatgaagtggtagagtgttatttaaaagtatttagatttaggtgtaaatgtatattgcaaactctagggcaagtattaaagaaaattttaaaagaagtataatagataccctacaaaatgagaaaaaatagaaataatatgaggtgtttaaaccagagaaggcaaaaagagagaagattaaaaaaaaaaaaagaaaaaatggatggaatgaaaaacagttacaaatatggtagataataatctatctcaataattatattaaatgtgaatgattaacacacatcaattaaaaagacagactgagaagagaaattaaaacaaaaagtcccagctgtatatggtctacaagaaacccatttaaaatataaagacacagattaaaagtaaagggatgga

SEQ ID NO: 2816 - DNA, 1319 bp, Homo sapiens
  source 1..1319: mol_type = other DNA
gagaattcggcccagagtgtatgtacctttttccctgtcagacttgaagcaaattaaaatagacctaggtaaattatcagataaccctgatggctatattgatgttttacaagggttagaacaatgcttttatcggacatagacagatataatgttgctgctagatcagacgctaaccacaaaagagagaagtgccaccataactgcagccagagagtttggcaatctctggtatctcagtcaggtcaatgataggatgacaacagaagaaagagaacaattctccacaggccaggaggcagttcccagtgtagaccctcactgggacgcaaaatcagaacatggagattggtgccgcagacatttgctaacttgcgtgcaagaaggctaaggaaaactaggaggaagactatgaattattcaatgatgtccactataacacaggaaaaggaagaaaaatcctaccgcctttctggagacactaagggaggctttgagaaagcatacctctctgtcgcatgactctattgagggccaactaatcttaaaggataagtttatcactcagtcagctgcagacattagaacaaaacttcaaaagtccgccttaggcccggagcaaaacttagaaaccctactgaacttggcaacctcagttttttataataaagatcaggaggagcaggcagaacgggataaacgggataagaaaaaggccaccactttagtcatggtcttcaggcaaatggactttgaaggctctggaacagggaaaggctgggcaaatcgaatgcctaacagggattgcttccagtatggtttacaaggacactttaaaaaagattgtccgaatagaaataagcctccccctcgtccatgccccttatgtcaagggaatcattggaaggcccactgccccaggggacgaaggtcctctgagtcagaagccactaaccagatgatacagcagcaggactgagggtgtccggggcaagcaccagcccacgccatcaccctcacagagccccgggtatgcttgatcattgagggccaggaggttaactgtctcctggacactggcgcagctgtctcagtcttactctcctgtcctggacaactgtcctccagatctgtcactatctgaggggatcctaggacaggcagtcactatatacttctcccagccactaagttgtgactggcgaactttactcttttcacatgtctttctaattatgcctgaaagccccactcctttgttagggagagacatcctaggaaaagcaggggccgttatacactagaattaggagaaggaa

SEQ ID NO: 2817 - DNA, 499 bp, Homo sapiens
  source 1..499: mol_type = other DNA
aggggtctccatctcccaggccacgtactgttaatctgctgtggcctgtaagtaactgtactgagccgaatttatagcccctccccattgctcacattactgcctgagctctgcctcctctcagatcagtggtggcattagattgtcttaggagcacaatccctgttgtgaactgcacatgagagggatctaggttgtgtgctctttgtgagaatcttgtgcctgatgatctgtcactgtctcccatcaccccccaatgggaccatctaagttgcaggaaaataagctcaggactcccactgattctacattatgatgagttatgtaattgtttcattatatattacaatttaataataatagaaataaagtgcacaataaatataatgtcctcaaatcatcccaaaactacccccgccatctgtggaaaaattgttttccacaaaaccggtcctttctgtgtgttaaaattaagtgccaaaaagtttgggggaccact

SEQ ID NO: 2818 - DNA, 143 bp, Homo sapiens
  source 1..143: mol_type = other DNA
ctttagagattcccaccaaataagcagagtaaaatgtttaagtatcaccattttggaatccctagcgatgtaaaatggctactaatatcatcaagaagtaagacattatgcatctcctgatgacagtatatagtaccacttat

SEQ ID NO: 2819 - DNA, 247 bp, Homo sapiens
  source 1..247: mol_type = other DNA
tggctcacttgaggtcaggagttcgagaccagcctgaccaacacagagaaaccctgtctctactaaaaatacaaaaattagctgggcatggtggcacacgcctgtagtcccagctactcaggaggctgggccaggagaattgcttgaactagggaggcagaggttgcagtgaggcaagatcgcgccactgcactccagcctgggcgacagagaaagactctgtcaaaaaaaaaaaaaaaaaaaaaaa

SEQ ID NO: 2820 - DNA, 308 bp, Homo sapiens
  source 1..308: mol_type = other DNA
gctggggcggtggctcagcctgtaatcccgcactttgggaggccgaggcacacagatcacctgggttcgagaccagccttgccaaaatggtgaaaccccgtctctactaaaaatacaaaaattagccaggcgtggcagcgcacaactgtaatcccagctactcaggaggctgaggcaggagaatcgtttgaaccagggaggtggaggtggaggttgcagtgagccacgatagtgccactacactatcttgtgtctgggcaacagagtgagattgtctcaaaaaaaaaaaaaaaaaaaaaaaaaaaaaa

SEQ ID NO: 2821 - DNA, 463 bp, Homo sapiens
  source 1..463: mol_type = other DNA
gtcaggcctctgagcccaagctaagccatcatatccccagtgacctgcatgtatacatccagatggcctgaagcaactgaagatccacaaaaaaagtgaaaatagccttaactgataacatttcaccattgtgatttgtttctgccccaccctaacagatgaatgtactttgtaatctcccccacccttaggaagtttctttataatctccccaacccttaagaaggttctttgtatttctccccacccttgagaatgtactttgtgagatccaccccctgcccccaaaacattgcacttaactccaccacctattccaaaacctataagaactaatggtaatcccaacaccctttgctgactcctttttcagactcagcctgcctgcacccaggtgaaataaacagccatgttgctcacacaaagcctgtttggtggtctcttcccacggacgcgcgagaca

SEQ ID NO: 2822 - DNA, 297 bp, Homo sapiens
  source 1..297: mol_type = other DNA
gaccaaggacggtggttctcacctgtaatcccaacagcatgggaggccgaggcaggaggatagcttgacattaggagttctagaacagcctaggtagaacagcgagaccttgtatctacaaaaaaagaaaaaaatttaattagttgggtgcacacctgtagtctcagctactcagaaggctgaggcaggaggattgcttgagcccaggagttcaaggctgcagtgagccatgatggtgctactgcactccagcctcaatgacagaaaaagacattgcctcaaaaataaataaataaa

SEQ ID NO: 2823 - DNA, 307 bp, Homo sapiens
  source 1..307: mol_type = other DNA
ggacaggcacagtggctcatgccagtaatcccagcactttgggaagctgaggtgagaagactgcttgagcccaggactttgagaccagcccgggaaacatagcgagatcccatctctacaaaaaataaagaataaaaaaattagctgagcatcatgtacgtgtttttagtcccagctactcaggaggctgaggcaggagtatcacttgagcccaggagtccaaggttatagtgagctatgaccatgccattacacagcagcctgggaacagagcaaaactctgcctcaaaaaaaaaaaaaaaaaaaa

SEQ ID NO: 2824 - DNA, 402 bp, Homo sapiens
  source 1..402: mol_type = other DNA
aaatttggaagcaaccaaggtgtctctcaataagtgaatatataaacaacttgtggcacacccaaacaataaaatagtattcagcaataagaagaaatgaaatgtcaagccataaaaatacatgaaggaaccttaaagacatgtatctaagtgaatgaagccaatgtgaaaatatatactatattattccatctatataacattctgggcaaagcaaaactagggagacagtaaagacatcagtggttgtcaggggctagagggagagaaggagggatgaataagcagagcacatgggatttttagtgtagtggaacaattctctgtgatactataatggtagacacatgccatcatacatttatcaaaaccagtagaatgtacaacatcacaagtgaactc

SEQ ID NO: 2825 - DNA, 1184 bp, Homo sapiens
  source 1..1184: mol_type = other DNA
tcagttaggatacagatgatttaggccccactaccaatgagctaaactgacttttatggaacactacaaccaacaatataatacacattcttctcaagtacatatggaacattcaccaagataaaacatttcctgggctacaaaacaatctcaatctaaaacaagtgaaatcatgcagtctatgttctacaatgaattaaatcacctaaaatatcctcaaatgtttaaaaacgaaactacagaattctaaataatccatgaatcaaagaaaatagggggaaaattaaagaaattctgaatcaaatgatcatgaaaatgtgtgggatgcagcaaagtaatgcttagagagaaatgtatagcttttaaatgcttttagaaaaaaggcttaaaatcgaagtgtaaagcttccactttaaaagagcaagttaaatccaaacaagtaaaagaaaataagtagtaaagagcagaaaccaatgatagaaaacagattaaaaaaaaaaatcaatgaaacaaaaagttgcttccctgaaaagatcaacagaattgataatcaactaaaatgatcaagacagagactgagagacagagagaggaagcaagtattgaaaataaaagagggactgttactgtaggtcctaaaaacgtaagagaatattatgcacacatttatgacaataaattagacaacttagatgagtagacaacttccttgatgtctacttatcaaaatgaaagacaagtttctttatacccagtcatcaaaatgaaatagatgcattccttgaaagacacaaatcaccaaaactgacacaagcagaaatcaaaaatcagaatagtcctatgtgactatacttgtaacttaaaacccccacgaagaaaactaatataaaacatctaatgaatagtaccaaccttacacaaactctttgagcatataaaggaaaagcaaacacttcccataaaatttttatagatttatgcattaataccaaaaccagacaaggatataacacgaaaattaaaattaatttatataacaatattcctcataaccacacatgcaaaaaatcttcaataaaatagtagcagattgaatccagcaactcatagaaagtataatcatcaccaaatggggtttaattccaggaaggtgaggttggtttaacattcaaaatcaaacaata

SEQ ID NO: 2826 - DNA, 791 bp, Homo sapiens
  source 1..791: mol_type = other DNA
aaatacatgttaataaaaaccacgtgtttatggaaaaatacacaatatcaacaccgaatgtatttcaattctccccaaaattaatccataaatgtaatgcaacctactaaaactccaacagagggagaggggacaagataaaaaaaattttaagatgaagtagaaaattatacacacataagatagccaagaaaaatatttatggaaaagccgtttagctagtatttaaaaattatagcacaacagtctgatacttctgtgtgaactgacagataaatggaaaagcagaggaaatatttcacccatactacaagaatatgacaaaaatggtacttcaaagtggttaagaaggataattcaaaataaaaggtattggaacaaatgggaaataatcttgaaatataaaattatttcactacttcactctctagaacaaaacaaactgcaaataaatcaaataattaaatgttaaaatgaaatcataaaaagtataaaagtacttactaggagtaaacatgggggaaaatttttatgatcctcaagaaggattttctaaggattacataaaactcaatgacttttttcacttttatgactcaaagtcataaaagaaaatgataaatctgactacataaaaatttctaaacagaaaaacataccatatggtcaaaatacaaataacaaatcaataaaaagttttcaagacatatgacaaaaggctagtttccttacaatgcagattaagtgaatctacatacatgagaccaaaaacccaaaagaataggcaaaag

SEQ ID NO: 2827 - DNA, 327 bp, Homo sapiens
  source 1..327: mol_type = other DNA
gttcactaatatactgtgttggtaaagatataagggaaaaggtaccttaacaggttggtgggaataaaggttggaaccattctttgaatgacactttggcattagctaccaacattttaaatgcaaatatcctttgaagcagtaattctacttgcacagatttatcctacaacatatataatggcatgtattcccaaagaagtgtatacaagagtgttcacagaaatagtatttgtaagagaaaaaactaagtatcaacctaaataaccatcaataagggactgattaaataaaatatggtacatccccagagtcctctgcatctat

SEQ ID NO: 2828 - DNA, 222 bp, Homo sapiens
  source 1..222: mol_type = other DNA
agttgctttcatcacgtgtttccataatattctgttcttacctcttcatagtatatatcattctatataaggtaatggtatggttactgatttctttcctccaccagacagtgtactccttgaggaaaggtgctgtgacctttttctttgaggaaaaggactgtatgcattgtgtctgcattgcagtgccttagatgtgataggcactcagtttgttgaatg

SEQ ID NO: 2829 - DNA, 132 bp, Homo sapiens
  source 1..132: mol_type = other DNA
gcggggcacagtggctcacacctgtaatttcaacactttcagaagtcgaggtgggagaactgcttgagcccaggagttcaagaccaacctggccaacatagtaagaccccatctttaaaaaaataaaaataa

SEQ ID NO: 2830 - DNA, 308 bp, Homo sapiens
  source 1..308: mol_type = other DNA
gctgggagcagtggctcacacctgtaatcccagaattgtgggacaccgaggcaggtgggtcacctgaggtcaggagttcaagaccagcctggccaacatggtgaaaccccgtctctactaagaatacaaaaattagccaggtgtggtggcacatgcctgtggtcccagctactcgggaggctgaggcaggagaattgctggaacctaggaggtggaggttgcagtgagccaagattgcgccactgcactccagcctgggctacagagcaagactccacctcaaaaataaaataaaataaaaataaaaa

SEQ ID NO: 2831 - DNA, 272 bp, Homo sapiens
  source 1..272: mol_type = other DNA
gctgggtgtggtggctcacgcctgtaaacccagcacttcgagaagactgcttgacctcaggaatttgagcccagcctgggcaacatggcgaaaccctatctgcacgaaaaacacaaaaattagccgggcgtggtggtacgtgcctgtggtcccagctagttgggaggctgaggtggcaggatcacttgagcccagaagatgaggctgcagtgagccaagactgcaccactatactttagcctgggtgaaagagcaagaccctgtctccaaaa

SEQ ID NO: 2832 - DNA, 227 bp, Homo sapiens
  source 1..227: mol_type = other DNA
ataaatacataaatataaaagtttttttaaaaaattttaaaaatagccagcatggtggtgtgcacctgtagtctcagctacctggggggctgaagtgggaggactgcttaagcccaggaggtcaagggtatagtgagccataatcatgccactgcactccagcctgagcgacagagtaagactctgtctcaaaagaaacaaacaaacaaacaaacaaacaaaaaaac

SEQ ID NO: 2833 - DNA, 105 bp, Homo sapiens
  source 1..105: mol_type = other DNA
ccaggcatggtggctcatgcctgtaatcccagcactttgggaggtccaggcaggaggattgcttcaggccccaagtttgagaccagcctggacaaaagtgagacc

SEQ ID NO: 2834 - DNA, 526 bp, Homo sapiens
  source 1..526: mol_type = other DNA
ccatggcacagaactttcagagttttcaatcaaatacttattcagacacttgaaataatccaaaaccacttcttatgacatattttccatacctataggtatcacaggtctacttctatgcaaaattcgactggtcttctctctaagtaataacatgccaagagtcccagcttttatactagaagcctaagctttgccatatttatatatatcaaagcatggggcgcatctttaaatcagcagtacaaaattactatactctaggtttttgccagcaagtccaaccttgaaatgatttcctgcttttctggtcaagtcaggcttgtagcatttcatgtttgggaagacagtctaacacacaggatactacccacaccttcctcagttcttgctatcatattacatcaccagaaagtaatatatctggacattagcttatgtccttagataaaaatgccctacactgtttcacacaaagttataatcttggattttatcaagattcaatataagaaatgaccatatg

SEQ ID NO: 2835 - DNA, 836 bp, Homo sapiens
  source 1..836: mol_type = other DNA
ctctacaacaaaatttcctagagttgcttgtacatattgtctctaatctttcccttccgttgtctgaacccactcctgtcaggcttttgtccccaccattctgatcggatagctcttgtaatggtcactaatgacctccatgttgctaaattcaatggtcatttcatcttatttgatctgtcagcagtatttgacacagttgctcattccatctctctttgaaaacctttcaaagacttcacctctcagtttttctgccaccctggaggctcttttccaggctcatttgctgcttcctcttgatctgcaagacctctaaccatggagtatccccaaggcccagtccttggacctctgctttgtctgcattttcttggttatctcatttttgtttaataacttttaaagtatcatcatatgcaaatgactcataaacttatctgtcagaccagatatgtcacagatatgtcacaacttcatcttcacatatccagctatctactcaacatctctaatggacaggccccaaacacttaatctcatgaaattgctcttcccatgtttatatatggcaattcccatttctccagtcactaaggccaaaaactttatgattatccttgactgttcttttatatcccacatcttatctaccttggcagatcttggctttattttcaaaatatatgcagaacacttcctaccacctccattgttagcaccctgattcaagccaccatcatcttttgccttgattattgcagtagcttcgtaacagcacttccagctttgacccttgcgtcctataatctgttttccacagagcaacaagaaca

SEQ ID NO: 2836 - DNA, 1764 bp, Homo sapiens
  source 1..1764: mol_type = other DNA
tattccatgtttatggacaggaaaactcaatgtcaagatgtcagttcttcccaacatgatctacagattcaatacaatatcaatcaaaatttcagcaagttattttgtggatactgacaaacagattctaacatttatatggagaggcaaaacacccagaatagccaacacaatattgaagaacaaaattggaggactgacactacccaacttggagacttcaaactacagtaatcaagagagtgtggtatttgcaaaagaatggagaaatagatcaacagaacataatagagagcccagaaataaactcacataaatataatcaatttatctttgacaaaggagcaaaggcaatacggtgaggaaaggaaaatggacatctgaaagaaaaaatatgaatctagacacaaactttacacccttcacaaaaaataattcaaaatagatcacagacctaaatgtaaaatgtaaaactataaaaatcctagaagataacataggaggaaatttaggtgaccttgggtatggtgatgacttttttgatacaacaccaaaggcacaccctatgaaagacataattaataagctgaacttcattaaaatttctgctatgtaaaagacagtatcaagaggatgagaagacaagccacagactggaagaaaatattttcagaagacacatctgataaaggactgttattcaaaatatacaaagaacacttaaaattcaacaataagaaaatgaacccaattaacaaaaagaaaacaaacaacccaacaaatataatgggtcaaaaaccttaacagactcatcaccaaagaagatacatagatgacaagcatatgaaaagatgctccacatcatgtcatcagggaaatgcaaataaaacaacaatgagataccactacacacctactagaatactccaaatccagaacactgacaacaccaaatgctggcaaggatgcaacaagaacgctcattcactgctatggaaatgcaaaatggtatagccgctttagaacacagtttggcactttcttacaaaactaaacatactcttactgtaagatataacaatcatgctcattggtatttacccaaaggagctgaaagctatgtccaaacaaaaacctgcacactgatgtttatagcagctttattcataattgtcaaaacttggaagcaaccaagattttcttcagcagataaatgaataaacaaaccgtggcacatccagacaatggaatattattcagcactaaaaagaaatgagctacaaagccatgacaagacatggagaaatcttaaatggattattactaagtgaaagaagccaatctgaaaaggctacgtactactgtatgatttcaactatatgacattctagaaaaggcaaaactgtggaaacagtaaaagatcagtggttgccatgggctaggaggtgggaaggatgaataggcagagcacaaagaatttttagggcaatgaaactgtatactacatgatactataatggtgaatgcatgtcatcatacatttgtcaaaatccacagaatatacaatagcaagagtgaaccctaatgtaaactatgctctttggttggtaatgttgtgtcaaggaaggttcaccaacgtaacaaatgtactacttttgagggggtcgataatgggagaggctaggcatgtactagggcagggactatatgggggaaatctctgtaccttctgctcaattttactgtgaacctaaaacagcttaa

SEQ ID NO: 2837 - DNA, 90 bp, Homo sapiens
  source 1..90: mol_type = other DNA
ggggccccatccacatcacagcgtatgagatacataaagtcctactatagtacagtacatatacaatctttaaactaagataacagctct

SEQ ID NO: 2838 - DNA, 1419 bp, Homo sapiens
  source 1..1419: mol_type = other DNA
aataggaacagctctggtctgcagctcccagcgtgattgacgcacaggacgggtgatttctgtgtttccaactgaggtacctggttcatctcactgggactggttgaacactggtcgcaccccatggagggtgagccaaatcgaggcggggcatcacctcacccaggaagcgcaagggattgggggatttccctttcctaaccaagggatgccgtgacagactatacctggaaaaatgggacacttctgcccaaatagtgggctttttccacagtcttagcaacaagcagaccaggagattctctcccatgcctggcttgacggatcctatacccatggagccttgctcagtgctagcacagcagtctgagatcaatctgcgaggcagcagcctggcagggggaggggaatccaccattgctgaggcttgagtaggtaaacagagcgcccaggaagcttgaactgggaggagcccactgcagctcagcaaggcctactgcctccatagacttcagctctgtgggcagggcatagctgagcaaaaggcagcagaaacttctgtggacttaaacgtccctgtctgatagctctgaagagagcagtggttctcccagcatggtgtttgagctctgagaacggacagacggcctcctcaagtgggtccctgacccccgtgtagcctgactgggaaacacctcccagtaggggctgacagacacctcaaacaggcaggtgtccctctgggacaaagcttccagaggaaggatcaggcagcaatatttgctgttctgtagcctctgctggtgatacccaggcaaacagggtctgcagtggacctccagcaaactccaacagacctgcagctgagggacgtgaccattagaaggaaaactagtagacagaaaggaatagcttcaacatcaacaaaaaggacatccacaccaaaaccccatttgtaggttaccaacatcaaagaccaaaggtagataaaaccacaaagatggggagaaaccagagcagaaaagctgaaaattctaaaaatcagagcacctcatctcctccaaaggatcgcagctccttgccagcaacggaacaaagctggacagagaatgactttgacgagttgacagaagtaggcttcagaaggtcggcaataacaaacttctccgagctaaaggagcatgttctaacccgtcgcaaagaagctaaaaaccttgaaaaaaggttagatgaatggcttactagaataaacagtgtagagaagaccttaaatgacctgatggagctgaaaaccatggcacaagaacttcgtgatgcacgcacaagcttcaatagctgattcaatcaagtggaaaaaaggatatcagtaattgaagatcaaattgatgaaataaagtgagaagacaagattagagaaaa

SEQ ID NO: 2839 - DNA, 29 bp, Homo sapiens
  source 1..29: mol_type = other DNA
ctccttcatttgcaggacatcaagggctc

SEQ ID NO: 2840 - DNA, 302 bp, Homo sapiens
  source 1..302: mol_type = other DNA
ggctgggcacggtggctcactcctgtaatcccagcactttgggaggccgaggcgggtggatcagaaggtcaggagatcgagaccatcctggctaacatggtgaaaccccgtctctactaaaaatataaaaaaaaatttgctgggtgtcatggcgggcatctgtagtcctagctacttgggaggctgaggcaggagaatggcgtgaacccgggaggcggaggttgcagtgagccgagattgtgccactgcactccagcctgggcaactgagcaagactgtctcaaaaaaaaaaaaaaaaaaaa

SEQ ID NO: 2841 - DNA, 281 bp, Homo sapiens
  source 1..281: mol_type = other DNA
ggccaggcgcagtggcttatgcctgtaatcccagcactttgggaggctgaggcggacggatcccttgaggccaggagttcaagaccagcctggtcaacatggcgaaaccccatctctacaaaaaatacaaaaaattagccaggcatggtggtgcatacctgtagtcccagctactagggaggctgaagcaggaggatcacttgaactcaggaggcagaggctgcagtgagctgagattgcaccactgcactctagcctgggtgacaaagtgagaccctgtc

SEQ ID NO: 2842 - DNA, 161 bp, Homo sapiens
  source 1..161: mol_type = other DNA
agagatagcaagtagggttcatttctctcatctgactgttgggttcatctgactgttgagtggcggctctttggaattgtaatttgagaaggattgtgaagaaatcagtgggcttaataggaaatagtgctgtgattgattagcaatgtctgccatggcca

SEQ ID NO: 2843 - DNA, 245 bp, Homo sapiens
  source 1..245: mol_type = other DNA
gtatagtgataactgattttttataacaatgactcagaggcattgaagatccataactatcttctgaattatcacagaaagaagaaagttagaagagtttaatgttaagtgtattaaaaatcatattctaattcttttaatttggttatctgagtatgataatataggagagctcagataacaagaaaaggcaattggttagaacactccattcccacaggatgtgcattaacagactttttact

SEQ ID NO: 2844 - DNA, 170 bp, Homo sapiens
  source 1..170: mol_type = other DNA
tagttcttcaagtgtggttcctatagtagaacagcagcatcactggggaacttaataaaatgcatcttcttatatcccataacaaacttattgaataaacagggtggagcctagcgatgttttaacaagcccttaaggtaactgatgcatgctcaactcagagagccact

SEQ ID NO: 2845 - DNA, 253 bp, Homo sapiens
  source 1..253: mol_type = other DNA
tactttctctgtcaaatctcaacttagacttgacttcctccaaggagctttggctatactctctcctcccgacccccaccctggcatactacacagatcactctgggctcacttgcctgcctaatggtcatctccccagtagactgtaagctccttgagggcaaggattgtgttggaatttttgtattaacagtgcctggcttggtgcctggcacctagaaagcactcaataaatgtttgtttaatgaatgaa

SEQ ID NO: 2846 - DNA, 838 bp, Homo sapiens
  source 1..838: mol_type = other DNA
ctttcctccctctgctgcttggtccctcaccttgatgatgtggcttcgccccctccactctactgccagtgttctcccagggcttgctaaatccagcagacccctttcctgtcttactagatctgggcagcatttgacatggctgatcaccccttgcttcttggatggcacttccctggcacctctgtggctagttgtcctacctccctggctgttcctttcaggcttccgtgcaggcttctccacttgcccatgcacagtagggtctttcagggttctgctgtgggctccctagggaagcccatccatctggatggtttcaaggatggtgaggaatttagagttgacctccagccccaacatccttcctgatcacctgaaccacagttttgctgccctctaggtgcacagacaattcaggtccatggcccagatggtacttgctgtcttctgcaaacctgccccttctgggtacttcccttgaccccgagatcactcaggagccagacaggaaacttattctattcctgttttctctttctgcccaccacatccaatctctcaaaacggtcaggtctaccttaacatctcttgatttgagccactcccactgtcatcagctttcacctggattatcgtgacagcctcctactgcttctctatcatgtggccagagctatcttcctaaaatgcattgcatagttgatcaagtcactctctggcctaaaaccttccttggctccctgctgccctcaggataaagtctggacccctcagcatggcttgtgagactcatggtgtccttgtccctgctcacctctctggtctcatcacttgc

SEQ ID NO: 2847 - DNA, 304 bp, Homo sapiens
  source 1..304: mol_type = other DNA
ggccaggcatggtggctaatccctgtaatcccagcactttggaaggctgaggcaggcagatcatgaggtcaggagttcgagaccagcctgaccagcatggtgaaaccccatttctactaaaaatacaaaaaaaattagtgggcatggtagggcgtgcctgtagtcccagctactcggaaggctgaggcaggagaattgcttgaactcggcaggtggaggctgcagtgagccgaggtcacgccactgcactccagcctggacaacagagccaggctccatctcgacaaaaaaaaaaaaaaaaaaa

SEQ ID NO: 2848 - DNA, 120 bp, Homo sapiens
  source 1..120: mol_type = other DNA
gccctggctctgtcactaaatggcagtgagatgtcagacaaattcattcccttctctcagcctccactccctgtctgaaaccagaagactggatcaaggggttcccactggctcctccag

SEQ ID NO: 2849 - DNA, 300 bp, Homo sapiens
  source 1..300: mol_type = other DNA
ggcctggcacagtgcctcacatctgtgatcccagttctttgggaggctgaggcaggaggatcacttgagccaaggagttagaggtcaccctgggcaatgcagcaagatcgtctctacaaaacataaaaaaaataggcacagtggcatgcgcctatagtcccagcaactgaggaggctgaggcaggaggactgcttgagaccaagagttcgaggcagcagtgagccgtgactgcaccactgtactccagagcctgggtaacagagcaacaccttgtctctataagaaaaaaaaaaaaaaaa

SEQ ID NO: 2850 - DNA, 298 bp, Homo sapiens
  source 1..298: mol_type = other DNA
gctgggcacggtggctcacacctgtaatcctagcactttgggaggccaaggtgggtagatcacctgacgtcagggttcaagaccagcctggccaacacggcgaaaccctctctactaaaaatacaaaaattagtcaggcgtggtggcacgcacctgtaatcccagcaactcaggaggctgaggcaggacaattgcttgaacccgggaggcagaggttgccgtgagccaagatcgcgccattgcactccagcctgggcaacaagagtgaaactgtctcaaaaaaaaaaaaaacaaaaaa

SEQ ID NO: 2851 - DNA, 105 bp, Homo sapiens
  source 1..105: mol_type = other DNA
agagagaaattagaaggatagctgagaggaaaaaaatgttaacaattggtgaatccagaaggaagggtatatgggggttcattataccattctttcttaatttct

SEQ ID NO: 2852 - DNA, 278 bp, Homo sapiens
  source 1..278: mol_type = other DNA
ctccatccaagtcattgtccaagccagaaactggagtcatctcagataccttcccactcacacctccacatgcagtcgctcgattccattcacctcccaagtgtctcagttcattcttccatccctcccgccactggtttagttaggcccctccattctcacctggaccatcgcggtagcctcggagcttctgactgtgtctctggttgcagcccctacacgctctcttccttacaggagcggagcgatctttctcaagcgcgaatcaaatccttcca

SEQ ID NO: 2853 - DNA, 1090 bp, Homo sapiens
  source 1..1090: mol_type = other DNA
attctcatcccccaacttctgggttggtcccattagctaacccagtctctcccactttcctctcaaactctcctgctctgcctttgggttcctgctttgtggcaggcaatctcctgtcaatacttgaaattttaggaatgttctttttaattccagccttaatagaactctggctgcttcctgagaatatgtgttctttgtagttcttgcaaattaaggctttttttttttttcttttcttgctctcacatttattcccctcagaaccagcaggtggagtgagggttctcctgctcctccgtgccacttccagaccacttccccttgtgtcctgtcagatgccacccctctgaggagcacatatcctgccacatcttctttttcacttgctgctgtcactctccagcctcctggtcactcttccctgatcactgaggacctcagctctggctcggagcctccctcactatcccagcctctgtctcaccccagtgacttcatcctccttgaggaggaccacccagcactctggcatctcagtgctgagactcctcatctccagtgagctccttctctcttttgcatcagttatctgcatcctggccacacctgggatatgcatgactttttaaaacatcctgtccataaataccatgtccatcctcccaagtcacttgcctgagtacctctgctgttacaattctctctgtggaaactcacattcactgaacctgacattttcttcctattcctcagactcttcatgttttctttccttccttgtccatcaatctaatcactcctatacaagtcacctccaattcccttactctttcctccttctatgatactcatctgataaaaatctcaggctgagatgaatccagccacccacattcttgcccacagctgccccagaggctgaacccagggagaggtttgcgcggccaggttgactgatgtcactgtagattctcaggcccctttccttgcattctcagacaccacacctctagtttctctcctaccctgctggccactggctcacagccccttttatcaagtcctccttttctatcgacttcctcag

SEQ ID NO: 2854 - DNA, 110 bp, Homo sapiens
  source 1..110: mol_type = other DNA
attcatcccacctattccctttgctcaggttccatgctcattaaagaccattctggtgatgctctgacttctattgtagctttgcctccaataagcaaatggacattggt

SEQ ID NO: 2855 - DNA, 278 bp, Homo sapiens
  source 1..278: mol_type = other DNA
caaaattaaatatattgttgaagaatatatgtgttggcagtaaactaaaagaaatgcaagggaataattaacaagtcaagatgatatttacatttaaaaaggagagagatacaattgcagatttactggagtcttctgagatcttattaaatgttttatttcttaacattcctacatattaataaatgttctatttcttaacctgatagtgggtacatgaatgtttattattctgtaaatcatattgtgcttatgaattgtttcacaattaaaaaaaa

SEQ ID NO: 2856 - DNA, 240 bp, Homo sapiens
  source 1..240: mol_type = other DNA
ggatgtgagggcgatctggctgcgacatctgttaccccattgatcgccagggttgattcggctgatctggctggctaggcgggtgtccccttcctccctcaccgctccatgtgcgtccctcccgaagctgcgcgctcggtcgaagaggacgaccatccccgatagaggaggaccggacttcggtcaagggtacacgagtagctgcgctcccctgctagaacctccgaacaagctctcaag

SEQ ID NO: 2857 - DNA, 329 bp, Homo sapiens
  source 1..329: mol_type = other DNA
ggccaggcgtggtggctcacacttttactcccagcactttgggtggccaagtcgggcggatcatgaggtcagaggcacgagaccagcctggccaacatagtgaaaccccgtctccactaaaaatacaaaaattagccaggtgtggtggctggcgcctgtaatcccagctactcgggaggctgagacaggagaatcgcttgaacagggaggcagaggatgcggtgagctgagattgcaccgttgtactccagcccgggcgacagcgagagactcagactcacaaaaacaaaacaaaacaaaacagaacaaagcaaaacaaaacaaaacaa

SEQ ID NO: 2858 - DNA, 721 bp, Homo sapiens
  source 1..721: mol_type = other DNA
tatagtcagtatttgaatactttatgccacttctattgctatcccctggcccaagagaccatcctctcatgaatattacgggacgcagggcctcctcacctgtcctcctgcttttacgccttttgcctttgtggcctgttctcagcacctgaatcatggcatttttcactcactactgtgcaatggcctctcattccattagaatgaaagtcaaattctgtataatggttcaccacaccctgcaccgactgatgcctcagcaccatacagacgccatctcctgctacccctctactcacaatagctgctgtgactcccatggtgcttcaaacgggtgggtgcaccaggcacccattcacagcaaggcccttgaccttgtcatcccttcctcctcaaggcctctttgcttcctcacttctgagaagtctttgatctaatgtcatcctttcaacgcaccttcctaggccattcttaacttcagtactacccagcgtcctctaactcccatgttttagacttcctctttgcatatatcactatctgaagtgactcttgctcatatcacttagtatttactgtctgtctcctcccacaacagtgtaagctgcatgagagcaagcagagaattttacctgttctggtactttctgtatccccagaagcctagagcaatgcctggcacaaatggccagcagacaatacacatttgttgaatgaataa

SEQ ID NO: 2859 - DNA, 287 bp, Homo sapiens
  source 1..287: mol_type = other DNA
gccagccgtggtggcaaatgcctgtaatcccagcactttgagaggctaaggtggacagatcacctgaggttggaagtttgagactagcctggccaacgtggcaaaaccccatctctactaaaaatacaaaaattagccgggtgtggtggtgcgcacctgtagtcccagcttcttgggaggctgaggcatgagaatcacttgaacctgggaggcagaggtggaggttgcagtgagccaagatcatgccattgcactgtagcctgggtgacagagcgagactctgtctc

SEQ ID NO: 2860 - DNA, 269 bp, Homo sapiens
  source 1..269: mol_type = other DNA
atggtcctcgacttacaatggttcaacttagaatttttcaacattttgatggtgagaaagcaatatgcattcagtagaaatcgatttttgagtagccatacaaccattctgtttctcttttcatgcgatattcaataaattacatgagatatttaacattttgttataaaataggctctgtattagattattttgcccacccataggctactgtaagtgtgccgaacacatttaaggtaggctaggctaagctatgatggtccacaggt

SEQ ID NO: 2861 - DNA, 179 bp, Homo sapiens
  source 1..179: mol_type = other DNA
ttctttagtggatataaatgttcatgagtataattttatattgctccatacaaagcaaacatagctttgctattatgtgtagctctagtttatggcgttaaatataaaaagtaattaaatatctcaatattgtattacactccagatgttccaccacctgaattagcttgaaaaccact

SEQ ID NO: 2862 - DNA, 315 bp, Homo sapiens
  source 1..315: mol_type = other DNA
cctggtgccgtggctcgtgcctgtaatcccagcactttgggaggccaaggttgggagcattgcatgaggccaggagttccaaactagtctgggcaacacagcaagaccctgtttctacaaaaaaataaaattaaaaattaggtagacgtggtcacatgcaccagtagtcccagctactgggaaggctaaggctggaggatcttttgagcccaggattttgaagctgcactgagccgtgatctcaccacggcactccagcctgtgcaacacagtgagaccctgtctcaaaaaaaaaaaaaaaaaaaaaaaaaaaaa

SEQ ID NO: 2863 - DNA, 315 bp, Homo sapiens
  source 1..315: mol_type = other DNA
tgggcatggtggttcatacctgtaatcccagcactttgggagaccatgatggggtttgaggaaggtgtctctcaagcctaggaattcaagaccagcttgggcaacatggtggactctgtctccacaaaaaaaattagaaattagccaggcttggtggcatgcacctgtaggcccagctactcaggaggctgtgaggtgggaggatcaatgaagcccaggaggttgaggctgcagtgagtgacccgtgatcaggccactgcacaccagcctggatgacagagtgagactctgaaaaacaaaaacaaaaacaaaaaa

SEQ ID NO: 2864 - DNA, 586 bp, Homo sapiens
  source 1..586: mol_type = other DNA
actcaccaaattcgtagaatcagacacattagttctgaagtttatatgcaaaaatcagcaaattagacaatgaatgaacaaataccgtataagaagattaatgaagtatctatggttagaaattgagaatacactgcaagcttctatgaatacatgaagagatctctggaaaataatggacattctggacagttgatctaaatgcatatggaaattcagtgtatgaaaatgtatcatcttaaagcagtgaggaaaatatagatcattcagtaaaaattgtagcagtctgcaacaaaaacataaaattactgttggattgttatcttgagccacacaccagcatagattacaaacaaatcaaagcttataatgtaaaaaaaaaaaaaaaaaaaagcactgaaagaaaacatggacaaattcctttatgaacttgaagtagagaggcggcttttaaatatgactgaaaatccattaatcattaaaggaaaggataaatccaaccatatgaaaataaaaaccttctctacgggggaacatgtcaaaagaccactgattgactgggagaagcttctgcaattcatataac

SEQ ID NO: 2865 - DNA, 104 bp, Homo sapiens
  source 1..104: mol_type = other DNA
ctaggagtttgctagaagtgcataatcccagacctgagacagaatcagaaactgcattttaacaaggtttggaagtgacacctttgcactgttgacagtttgaa

SEQ ID NO: 2866 - DNA, 482 bp, Homo sapiens
  source 1..482: mol_type = other DNA
tgtggaagattgttggcaaagatggccctgtaatcctgctattcctctcaatgtgactttaccatgctttccattaagaggtacagttcatttctcttctcctcaattctatacttagccacatgacttgtttggtcaattggacattagaaaacataatacaaacagaggcttggaaagtgcctgcacattggggcatgccttttcttcctgttggaaatattgagaccatcctataaagaagtccaggctaccctggtgtggaaaccacatggaggagaaatgacgtgccattgaccaacagctgggtacctaccagtcatgcgactaggccaactttaaccatccagccccagctgagccaccagctacttggagcttcaagagcaagctcaggcaataccagtgaaaggaccattcagctgaatgcagttccaattgccaacccacaataaaacatgagctaatatatgcctgttgtt

SEQ ID NO: 2867 - DNA, 131 bp, Homo sapiens
  source 1..131: mol_type = other DNA
gtggtagccagtgttcaggatgggtaccaatgatccctgccttatggcatccagacttttgtttaaaattaccctcacattgagtagagttgacttgtgtaactcaaaaagatattacagaaatgaagtgt

SEQ ID NO: 2868 - DNA, 1092 bp, Homo sapiens
  source 1..1092: mol_type = other DNA
ttttggcacagcaaacgaaacaagcaacagattgaagagacaacctatgaaatgcgaggaaatattttcaaaccttaacctcttacatttgacaagaggttaatacctaaaatataaaagaaattcaaacaatagcaaaaaaaaaaatcaatagcacaaaaacaaataacccaattacaaagtaggcaaaggacttgaatagacatttctgaaaagaaaacacacaaatggccaacaggtttatgaaaaaatgttcaacatctttaatcatcagggaaatgcaaataaaaatcataatgagctatcacctcacactttttagaatggctgttaataaaaaatgaaaaataagtgttgatgaggatttggagaaaagggaaccctttaacactgttggtgggaatgaaattagtgcagccattatgcaaagtagtatggagatatgtcaaaaaattaaaaatcaaactaccatatgatccaacaatgccactactagctgtatatccaaagtaaatgaaatcagtatgttgaaaagatatatgcacttccatgttcattgcagcgttattcacaatagccaaaatattgaatcaacctcagtgttcatcagtgaatggatggataaagaaaacgtggtgtatatatacacaatagaacctattcagcctttaaaaacaaggaaattctttcatttgcaaaaatatagatgaatctggagaacagtatgttaagtgaaataagccaggcatagaaagaaaatattgcacgatctcacttatatgtgaaatctaaaaaaatagaactcatagaagcagagaatagaatgatgatgaccagggactagggcagtggggattgggaaagtattggtcaaaggatgcaaaatttcagttatataggaggaataagttcaagagatctagcatacaacatggtgactatagttaatgtattcttgaaaattgctaagaaagtagattttaagtgttcgcatcacaaaaaaatgaaaagtatgtgatataatgcatatgtaaattagcttaatttagccattccacaatgtatacatatttcaaaacatcatgttttata

SEQ ID NO: 2869 - DNA, 6152 bp, Homo sapiens
  source 1..6152: mol_type = other DNA
gggggtggagtcaagatggccgaatacgaacagctccaggctacagctcccagcatgagccacgcagaagacgggtgatttctgcatttccaactgaggtaccgggttcatctcactggggagtgccggacagtgggtgcaggacagtgggtgcaatgcaccgtgcgtgagctgaagcagggtgaggaattgcctcacctgggaagtgcaaggggtcagggaattccctttcctagtcaaagaaaggggtgacagatggcatctggaaaatcgggttacttccacccgaatactgcgcttttccaacaggcttaacaaacggcacaccaggaggttataacccgcacctggctcagagggtcctatgcccacgaagcctccctcattgctagcacagcagtctgagatcaaactgcaaggcagcagcgaggctgggggaggggcgcctgccatttccgaggcttgagtaggtaaacaaagcggctaggaagctcgaactgggtggaccccaccacagctcggggaggcctgcctgcctctgtaggctccacctctgagggcagggcacagacaaacaaaaggcagcagtaacctctgcagacttaaatgtccctgtctgacagctttgaagagagtagtggttctcccaacacgcagcttgagatccgagaacggggatactgcctctcaagtgggtccctgatccccgagtagcctaactgggaggcaacccccccgtgggggcggactgacacctcacatggccgggtactcctctgagacaaaacttccagaggaacgatcaggcagcagcatttgcggttcaccaatatccgctgttctgcagccaccgctgctgatacccaggcaaacagggtctggagtggacctccagcaaactccaacagacctgcagctgagggtcctgactgttagaaggaaaactaacaaacagaaaggacatccacaccaaaaacccatttgtacgtcaccatcatcaaagaccaaaggtagataaaaccacaaagatgaggaaaaaacagagcagaaaaactggaaactctaaaaatcagagtgcctctcctcctccaaaggaatgcagctcctcaccagcaatggaacaaagctggatggagactaactttgacaggttgagagaagaaggtttcagaagatcgaactactccgagctaaaggaggaagttcgaaccaatggcaaagaagttaaaaaccttgaaaaaaaattaggtgcatggctaactagaataaccaatgcagagaagtacttaaaggacctgatggagctgaaaaccatggcacgagaactacgtgacgaatgcataagcctcagtaggcaatgcgatcaactggaagaaagggtatcagcgatggaagacgaaatgaatgaaatgaagtgagaagagaagtttagagaaaaaacaataaaaagaaatgaacaaagactccaagaaatatgggactctgtgaaaagaccaaatctacatctgattggtgtacctgaaagtgacggacagaatggaaccaagttggaaaacactctgcgggatattatccaggagaacttctccaatctaggaaggcaggccaacattcaaattcaggaaatacagagaacgccacaaagatactcctcgagaagagcaactccaagacacataattgtcagattcaccaaagttgaaatgaaggaaaaaatattaagggcagccagagagaaaggtcgggttacccacaaagggaagcccatcagactaacagctgatctctcggcagaaactctacaagcgagaaaagaatgggggccaacattcaacattcttaaagaaaagaattttcaacccagaatttcacatccagcaaactaagcttcataagtgaaggagaaataaaatacttcacagacaagcaaatgctgagagattttgtcaccaccaggcctgccataaaagagctcatgaaggaagcactaaacatggaaaggaacaaccggtaccagccacttcaaaaacatgccaaattgtaaagaccatcaaggctaggaagaaactgcatcaactaacgagcaaaataacctgctgacatcataatgacaggatcaaattcacacataacaatattaaccttaaatgtaaatgggctaaatgctccaattaaaagacacagactggcaaattggataaggagtcaagacccatcagtgtgctgtattcaggagacccatctcacatgcagagacacacataggctcaaaataaagggatggacgaaaatcaaccaagcaaatggaaaagaaaaaaaggcaggggttgcaatcctagtctctgataaaacagactttaaaccaacaaacatcaaaagagacaaagaaggccattacataatggtaaagggatcaattaaacaagaagagctcactatcctaaatatatatgcacccaatacaagagcacccagattcataaagcaagtccttagtgacctacaaagagacttagactcccacacaataataatgggagactttaacaccccactgtcaacattagacagatcaacaagacagaaagttaacaaggatatccaggaattgaactcagctctgcaccaagtggacctaatacagacatctacagaactctccacttcaaatcaacagaatatatattcttttcagcaccacaccgcacctattccaaaattgaccacatagttggaagtaaagcactcctcagcaaatgtaaaagaacagaaattataaaaaactctctctcagaccacagtgcaatcaaactagaactcaggattaagaaactcagtcaaaaccgctcaactacatggaaactgaacaacctgctcctgaacgactactgagtatgtaacaaaatgaaggcagaaataaagatgttctttgaaaccaatgagaacaaagacacaacataccagaatctctgggacacattcaaagcagtgtgtagagggaaatttatagcactaaatgcccacaagagaaagcaggaaagatctaaaattgacaccctaacatcacaattaaaagaactagagaagcaagagcaaacacattcaaaagctagcagaaggcaagaaataactaagatcagagcagaactgaaggaaatagagacacaaaaaacccttcaaaaaatcaatgtatccaggagctggttttttgaaaagatcaacaaaattaatagatcgctagcaagactaataaagaagaaaagagagaagaatcaaattgacgcaataaaaaatgataaaggggatatcaccaccgatcccacagaaatacaaactaccatcagagaatactataaacacctctatgcaaataaactagaaaatctagaagaaatggataaattcctcgacacatacaccctcccaagactaaaccaggaagaagttgaatctctgaatagaccagtaacaggctctgaaattgaagcaacaattaatagcttaccaaccaaaaaaagtccaggaccagacggattcacagccaaattctactagaggtacaaggaagagctggtaccattccttctgaaactattccaatcaatagaaaaagagggaatcctccctaactcatttgatgaggccagcatcatcctgataccaaagcctggcagagacacaacaaaaaaagagaattttagaccaatatccttgatgaacattgacgcaaaaatcctcaataaaatactggcaaactgaatccagcagcacatcaaaaagcttatccaccatgatcaagtgggcttcatccctgggatgcaaggctggttcaacatatgcaaatcaataaacgtaatccagcatataaacagaaccaatgacaaaaaccacatgattatctcaatagatgcagaaaaggcctttgacaaaattcaacaaccttcacgccaaaaactctcaataaattaggtattgatgggacatatctcaaaataataagagctatctatgacaaacccacagccaatatcatactgaatggacaataactggaagcattccctttgaaaactggcacaagacagggaagccctctctcaccactcctattcaacatagtgttggaagttctggccagggcaatcaggcaggagaaggaaataaagggcactcaattaggaaaagaggaagtcaaatggtccctgtttgcagatgacatgattgtatatctagaaaaccccattgtctcacccaaaatctccttaagttgataagcaacttcagcagtctcaggatacaaaatcaatgtgcaaaaatcacaagcattcttatacaccaaaaacagacaaacagagagccaaatcatgagtgaactcccattcacaattgcttcaaagagaataaaatacctaggaatccaacttacaagggatgtgaaggacctcttcaaggagaattacaaaccactgctcaatgaaataaaagaggatacaaacaaatggaagaacattccatgctcatgggtaggaagaatcaatatcgtgaaaatggccatactgcccaaggtaatttatagattcaatgccatccccatcaagctaccaatgacttgcttcacagaattagaaaaaactactttaaagttcatatggaaccaaaaaagagcccgcattgccaagtcaatcctaagccaaaggaacaaagctggaggcatcatgctacctgactttaaactatactataaggccacggtaaccaaaacagcatggtactggtaccaaaacagagagatagaccaatggaacagaacagagccctcagaaataatgccgcatatctacaactatctgatctttgacaaacctgagaaaaacaagcaatggggaaaggattccctatttaataaatggtgctgggaaaactggctagccatatgtagaaagctgaaactggatcccttccttataccttatacaaaaattaattcaagatggattaaagacttacatgttagacttaaaaccataaaaaccctacaagaaaacctaggcaataccattcagaacataggcatgggcaaggacttcatgtctaaaacaccaaaagcaatggcaacaaaagccaaaattgaaaaatgggatctaattaaactaaagagcttctgcacagcaaaagaaactaccatcagagtgaacaggcaacctacagaatgggagaaaatttttgcaacctactcatctgacaaagggctaatatccagaatctacaatgaactcaaacaaatttacaagaaaaaaacaaacaaccccatcaaaaagtgggtgaaggatatcaacagacacttctcaaaagaagacatttatgcagccaaaaaacacatgaaaaaatgctcatcatcactggccatcagggaaatacaaatcaaaaccacaatgagataccatctcacaccagttagaatggcgatcattaaaaagtcaggaaaaaacaggtgctggagaggatgtggagaaataggaacacttttactctgttggtgggactgtaaactagttcaactattgtggaagtcagtgtggtgattcctcagggatctagaactagaaataccatttgacccagccatcccattactggatatatacccaaaggattataaatcatactgctataaagacacatacacacgtatgtttattgcggcactattcacaatagcaaagacttggaaccaacccaaatgtccaacaatgatagactggattaacaaaatgtggcacatgtacaccatggaatactatgcagccataaaaaatgatgagttcatgtcctttgtagggacatggatgaagctggaaaccatcattctcagcaaactatcgcaaggacaaaaaaccaaacacctcatgttctcactcacaggtgggaattgaacaatgagaacacatggacacaggaaggggaacatcacacaccagggactgttgtggggttgggggagcaggggggatagcactaggagatatacctaatgctaaatgatgagttaatgggtgcggcacaccaacatggcacatgtattcatatgtaacaaacctgcatgttgtgtacatgtaccctaaaacttaaagtataataataaaatttaaaaa

SEQ ID NO: 2870 - DNA, 205 bp, Homo sapiens
  source 1..205: mol_type = other DNA
ggtaaactatagcccacaggtcaaatccatcccacaacctgtttttgttacttaagttttattggaacacagctatacccacttgtttatgtagtggctgtggctgcttttgtgctataatgatattgctgaggaattgcaacagagactataggtagcccacaaccacagcccacaatatttactgcctgacctttacgggaaa

SEQ ID NO: 2871 - DNA, 408 bp, Homo sapiens
  source 1..408: mol_type = other DNA
gtgatgaccatgaaggtgtcttactcatctctccctgcaagacaacctgctgtgaagagcagttgactgacagctttaactcgctactcctttgaagctgccatggtatttacagaggctactgagcatggaggctacagtggtaattcctgcttaatgcgggacccctgtaatagactttgttcagggccttcccatcagcctgactgagacagccaggactgcaattcaaggcccttcctatataatccttctttctttctgtccatccacagatgttaggcttgcatcatggtctgaggctctcccaaacatcatgtctactcccatcatcatttacaggtgtgtttcccaagatctcttgtacatttaattccatcttagaatcatatcttggcatgaactgac

SEQ ID NO: 2872 - DNA, 242 bp, Homo sapiens
  source 1..242: mol_type = other DNA
agatgggcagaagcacagtagagtagccaggtgaccaggccgatccaggttccaaaggaatttccatcacttaccagttatgtggatcagaacaagtgatttatgctgtgagtttcatctgtcaaatggggattttcacaggagttccattatagagttgtagttaaggatgagatgatcttatatgcgtaccagttagcttggcatctgacatgtagcaaaaattcactaacagtggtgat

SEQ ID NO: 2873 - DNA, 465 bp, Homo sapiens
  source 1..465: mol_type = other DNA
gttatggattgaactgtgtgcccctaaaagatatgttgaagcctgaactcccagtacctgagaatgtgaccatgtttggaaatagtgtctttgcaggtttaatcaagttaagatgaggtcattagatgggacctaatttaatatggctgatgcccttataagaagagggaattttggacacagacatacaaggaggacgccatgtgaagacacagttggaaaagcagggaagagatggccttgtgtataaggaggcagagactggagttatgctgccacaagccaaggaacaactggggctacctgagctggaagaggcgaggaaggattctcccctagagggttctgagggagcgtggacctgccaacaacttggtttcagatttctagtctccagaactatgcagtaataaatttctgttgttttaagccacccagtttgtggcactttgttacgtcagccct

SEQ ID NO: 2874 - DNA, 825 bp, Homo sapiens
  source 1..825: mol_type = other DNA
ttgaaggtcacaaagacaccccaaactcaacatattcaaatcaagctcatttattatcaccacattcacccccagtctgttatttttttctctttctcaaagaatggcaacttatgtttatgttatctttctctcttttcctttaccttccatatcacttccatgtcagagttcctggatcttatcccctaaatacctcttgattttgttcacatctctctgtctacattagcaccacccacatgtgtactacatcacatatgacctggaccaccatacagcctcccaactgatttattagcaacccctctggcctttttcctaatatgaatctaatatcaccctcaccttcacttctctcccactgcttcatatttttcaatgtttcttcattgctgttaggacaaacacaaaactcttgacatgactttcaaagtcctgcatggtctagctcttctccacctctcaagactgacttcacctctggccttctcttgatttctctggatcagctacactggcttttttcaacccactctttcgggatataggacctttgcgtatgctcttccctgtgcctggaatactcttcagatcccacctcaaccattccctgatcactctatccagctcaaatgcccccattatcagctcccattgcaccttaggaactgcttctccctgatagcacttttcagagtcaaatgttatattttttcattaattgtttggtcaatgcctatttctagactgtaggatctactttggcaggatacgcattaataattcctcactattgtattctcagtgtctagcccaatgcct

SEQ ID NO: 2875 - DNA, 308 bp, Homo sapiens
  source 1..308: mol_type = other DNA
ggccaggtgcagtggctcatgcctgtaatcccagcactttggaaggccaaggcaggtggatcacctgaggccaggagtttgagaccagccaggccaacatggtgaaacctcgtctctactaaaaatacaaaaaattagccaggtgaggtggcaggtgcctgtaatcccagctactcggaaggctgaggcaggagaagtgcttaaacctggagatgggaggttgcagtgagctgagatcatgccactgtactccagtctggtgacagagtaaggctctgtctcaaaaaaaaaaaaaaaaaaaaaaaaaa

SEQ ID NO: 2876 - DNA, 223 bp, Homo sapiens
  source 1..223: mol_type = other DNA
gtgggagagcacagacttgggagtcaaaaagattcggaacataattctggcttcatcatgactagttttatgacttggcacaaatcactacatgtttatcatctccattcttgtaagatgggaataataacatctgccttatattgagactgtaaggatttgaggtaattcatgctgatttcttggtacataagatgtgactgcaataaacaataattattct

SEQ ID NO: 2877 - DNA, 1577 bp, Homo sapiens
  source 1..1577: mol_type = other DNA
gtaaattggtaccagtagagtggggcgctgctgaaaagatacccaaaaacatggaagctactttggaactgggtaataggcagaagttggaacagtttggagggctcagaagaagacaggaaaatgtgggaaagtttggaacttcctagagacttgttgaatgtctttgacaaaaaatgctaataggcatataaaaaataaggtccagactgaggtggtctcagatggagataaggaacttattgggaactggagcaaaggtgacacttgttatgttttagcaaagagactggtggcattttgcctctgctctagagatttgtgaaactttgaacttgagagggatgatttagggtatctggcagaagaaatttctaagcagcaaagcattcaagaagtgacttgggtgctgttaagcattcagttttaaaggggaaagacagcataaacgtttgggaagtttgcagcctgacaacgcaatagaaaagaaaatcccattttctgaggagaaattcaagctggcttcagaaatgtgtataagtaatgaggagccaaatgttaatcactaagagaatggggaaaatatctccagggcatgttagagaactttgcggcagcccctcccatcacaggcccagaggtttaggaggaaaaaatgattttgtggtccgggcccagggtccctctgctgtgtgcagtctagggacttggtgccctgtgacccagccactccagccataactaaaaggggccatggtatagctcaggctgttgcttcagagggtggaagcctcaagccttggcagcttccacatggtgttgagcctgcaggtgcacagaagtcaagaattgggatttgggaacctccgcctagatttcagaggatgtatgaaaatgcctggatgcccaggcagaagtttgttgcaggggtgggaccctcatagagaacctctgctaaggcagtgcggaagggaaatgtggagttggagcccccacacagagtccctactggggcaccacctagtggagctgtgagaagagggccaccatcctccagaaaccagagtggtaactccaccaacagcttgcactgtgcacctggaaaagctgcagacacccaaaaccagcctgtgaaagcagccaggagggaagcaatatcctgcaaagccacaggagtggaggtgccaaagactataggaacctaccacttgcatcagcatgacctggatgtgagacatggagtcaaaagagatcattttagagctttaagatttaactaccctgctggatttcagacttgcatggggcctgtggccccattgttttggccaatttctcccatttggaattggtgtatttacccaatgtctgtaccctcttggtatctaggaagtaactaacttgcttttgattttacaggctcataggtagaagggaattgcttgtcttggatgagactttggaatgtggacttttgaattaatactgaaatgagtggagactttggagggctgttgggaaggcatagttggtgttgaaatgtgaagatatgagatttgagaggggccagggacaga

SEQ ID NO: 2878 - DNA, 483 bp, Homo sapiens
  source 1..483: mol_type = other DNA
agttcttcattcatagattcaacccaaaaccatcaggtatttgaagaaaataagtaaataaattgttagaagtctagataaagaaacaggacaactgaccctggtgaaaagaggaataattattggacagaaaacaactttaaaaagatgtaactggcatggtcagagagactggctatgctgttatagccatccccaaagaactcactgcttggggaaaggaggaagcagagaacaagaaagtaccttggcaatttagaatctatttgtgaatattaaacattcagtatacaggttaattaaaatttgaacacagctaaagaccaagttactaaagaccaacagcacaagctgcaaaagacagagagaaagaaaatatgaaaggaaaatgaaaatgtagagaagctaaacccagaaggttcaatatcacctaatctatctccagaagcagataacaaagtgccaggaaggatgagttaaagg

SEQ ID NO: 2879 - DNA, 71 bp, Homo sapiens
  source 1..71: mol_type = other DNA
tgggggcggggcctggggatctacccttctaaaaaactctccaagtaattctgataccaataaagtgggag

SEQ ID NO: 2880 - DNA, 292 bp, Homo sapiens
  source 1..292: mol_type = other DNA
aagaaagatcatgtcctttgcaggaacatggatggggctggaggccattatccttaacaaactaacataggaacaggaaaccaaatattccatgttctcacaagtgggagtgaaataacatggacacaaaggaataacatactggggcctacctgagggtggagggtgggaaaagggacaggaccagaaaagtaactattgggtactaggcttagtacctgggtcactaaataatctgtataacaaacccccttgtcacgagtttacctgcacatgtaccccctgaacctaa

SEQ ID NO: 2881 - DNA, 134 bp, Homo sapiens
  source 1..134: mol_type = other DNA
ggctgggtgcggtggttcatgcctataatcccagtgctttacaaggctgaggcaggaggctctcttgagaataggagttcaagaccagcctgggcaacatagcaagatcctgtctctccaaaaaaaaaaaaaaa

SEQ ID NO: 2882 - DNA, 76 bp, Homo sapiens
  source 1..76: mol_type = other DNA
agttcagtgcacatacaacttggaccagaggatctgggtttgaatcccatctctgatacttcccaaactgagctgt

SEQ ID NO: 2883 - DNA, 764 bp, Homo sapiens
  source 1..764: mol_type = other DNA
cacctctccgcgccagagccggcgccagcgcctctccgcgcctgcgccgccgctgcgcgcctcgccgccgctgtctgcctctccgccgctgtccgtctctccgccgcgccgccgctgtccgcctctccgccgcgccgccgctgtccgcctctccgccgctgtccgtctctccgccgcgccgccgctgtccgcctctccgccgctgtccacctctccgccgctgtccgcctctccgccgcgccgccgctgtccgcctctccgccgctatccgtctctccgccgcgccgccgctgtccgcctctccgccgctgtccgtctctccgccgcgccgccgctgtccgcctctccgccgctgtccgcctctccgccgctgtccgtctctccgccgcgccgccgctgtccgcctctccgccgctatccgcctctccgccgcgccgccgctggccgcctctccgccgccgtccgcctctccgccacgccggcgccagcgctgtgtgcctttgcgagggcggagctgcgttctcctcagcacagacccggagagcattgcgagggcggagctgagttctcctctgcacacacttcggagatacagcgaaggcagagcaatgttctcctcagcagagacccgggcgggcgggccggtggcaccgcgagggcggagctgcgttctgctctgcacagaccttgggggcactgcctcgctttgggacaactcggggccgcatggacggtgaataaaatccttcctgtttgcagccctg

SEQ ID NO: 2884 - DNA, 316 bp, Homo sapiens
  source 1..316: mol_type = other DNA
acttccagttctggaacaagatggttaaactcatttttccctgctctgctcctctaaatacaactaagtaccttggaaactattcagcagacaatgataaagggctctgaaagctagaagaaaaggtgtacttgcaagaaacctcaggacttgagtaacagcaacatggtaagttttctaagttttcttttcgtctcccatatacgctgggctgtgctggaatcaccaacaggcacagaaaaaatgacaacaaaacaacaacaaaacccccaagaatatcctgttgtctttggccaaagttcaggaaaggggagcc

SEQ ID NO: 2885 - DNA, 293 bp, Homo sapiens
  source 1..293: mol_type = other DNA
gaccaggtgcggtggctaatgcccgtaaattgcagcactttgggaggctgaggcgggaggatggcttgaggccaggaatttgagaccaacctgggcaacacagaaaccccatctttacaaaacaaaattaaaaattggcctggcatggtggcacgcatctgtagtcccagctactccggaagctgaggaaggaagatcgcttgaacgcaggaattcaaggttatagagaactatggtcaagccactgcactccagcctgggcaaaagagcaagaccctctctctaaaaaaaaa

SEQ ID NO: 2886 - DNA, 617 bp, Homo sapiens
  source 1..617: mol_type = other DNA
cctgcgcctctccgcgccagagccggcgccagcgcctctccgcgcctgcgccgccgctgcgcgcctcgccgccgctgcgcgcctcgccgccgctgtctgcctctccgccgctgtccgtctctccgccgcgccgccgctgtccgcctctccgccgctgtccgcctctccgccgctggccgcctctccgccgcgctgccgctgtctgcctctccgccgctgtccgtctctccgccgcgccgccgctgtccgtctctccgccgcgccgccgctgtccgcctctccgccgcgccgccggtggccgcctctccgccgctggccgcctctccgcctcgccggcgccagcgctgtgtgcctttgcgagggcggagctgcgttctcctcagcacagacccggagagcattgcgagggcggagctgagttctcctctgcacagacttcggagatacagcgaaggcagagcaatgttctcctcagcagagacccgggcgggcgggccggtggcaccgcgagggcggagctgcgttctgctctgcacagaccttgggggcactgcctcgctttgggacaactcggggccgcatggacggtgaataaaatccttcctgtttgcagccct

SEQ ID NO: 2887 - DNA, 428 bp, Homo sapiens
  source 1..428: mol_type = other DNA
agttggctggaaattcttgttacttatcctattgagaagtggcctatgacctctttctttgaatctagatggactctgtgactacatgactaataaaatatggcagaaatgacaccatgcagtttccaagcccaggccttaggagacaggcagcttccagttcagtcttttggagggtcagctctggggccctcagccatcacgcatggagtccaaccaccctgagacgtcatgctggagacccacctgtggatgccccagtcaagagtcctggctgagcccagcctcccagccacccccacccaaggcatcagaccacgaagcttctggccaaggcttcaccaacttcacttgatgctgtgaggaacagaactgcccatccaagccctgccagaatttctaacccacaaagccatgagtcacaataa

SEQ ID NO: 2888 - DNA, 135 bp, Homo sapiens
  source 1..135: mol_type = other DNA
ctatgcttcccagactctttggcagttgcactgggtactggctgagttctggaaaacaggaatgtgagcagagtgctgcagatctccttgtcaggagcacctaagaactggcatgactctacaccctctctcctt

SEQ ID NO: 2889 - DNA, 1245 bp, Homo sapiens
  source 1..1245: mol_type = other DNA
attaccaggcataaaaagcagcagacaatcatgatgcaaactgaaaataatcaatcaaaactgacccagaacttaaatagatgttaaaattagcagaggaggacattaaaactgtttttatacatgtatctcatataatcaaaacattaaatagagacatgggagataaacaagaaaagccaaaatcaaactttcaaagacaaaaacatttgagatgaaaattacattggatgaactaaagcagattagaaactgcagaagaaaagattagcaaacttgaagatacaagaacagacactagctaaagtacaaaaagaaaaaaaaatcttaaaaagtgatttttaaaaagcatcagtgagcagtcaggcaacttcaaatggcctaataatatgcaggtaactggagttcccaaaggagaaaaaaaagaaagagaaaaaaatacttgaagaaacaactgctgaaaatgttctagccataagaagacctattaactcacggatccaagaaactcagcaaaccccaagcacaagaaacatgaagaaaattacactaagggataacataatcaaattgttcaaaatcaaggaaacattattaatagcaggtgtataaaaagacatgttacctatagaagaacaaagataagaacaacatcagatttcttttgagaaacaatgcaagtgagaagacagcggtacatctctaaagttctagaagaaaaaaggccaactagaattctatgcctggcaaaaatatctttcaaaaatgaaggtgaaataaagacacaccagaaacataaataatgaaataattcatcaccaggagaccttcactgcaagaaatgttaaaggatattcttcagaaacaaaatgatgtcagatgaaaatctggatcaatactaaggaataaagagcaccaaagtggtaactatatgagcaaacatcttttaaattttttattatttaaatctctaagagatacatgtttaataaaaaaacagcaaaatattacagagtttatgacatatgtaaaagtcaaatgcatggcagcaatagcacaaagtgcaggagggaggaaaagaaagtaaatgaaggaatgcttttattatagatgaagtgtacaatattacttgaaggtagacctctctaaatgtgcactataatcttaaaggaaccacaaaaataatttttaaaaataggtaaaagtaataaaaggaggcaaactggaatcataataaataatata

SEQ ID NO: 2890 - DNA, 545 bp, Homo sapiens
  source 1..545: mol_type = other DNA
ctgggcctgaggtctcccgtgcgcctctcggcgcctgcgcccgcgctgtgcaccgccccgcgcctgcgcccgcgctgtgcctttgcgagggcggagctgcgttgtgctcagcacagactcggagagcatcgcgagggcggagcagtgttctccttggcacagacccgggcgggccaggggcaccgcgagggcggagctgcgttctgctcagcacagaccagggggacaacgtgaaggcagagcagcgttctcctcagcacggaccttgggggcactgcctcgctttgggacaactcggggccgcatcgacggtgaataaaatccttcctgtttgcagccctgaataatcagggtcagagaccagttagaagggttcagtgtggaaaacaggaaaccaaaagcccctctgaatcctgcccaccgaggttctccccagccaaggtgaggcggccacagtgcgagatccacaccgcagcctcggaagacaaatgcagcattcctaatgcagacatgacactcaaaatatgacaccccccttgctcatg

SEQ ID NO: 2891 - DNA, 213 bp, Homo sapiens
  source 1..213: mol_type = other DNA
gaacttcggagccggctctccctaggccccgagcttggccgcatccgtccttactctggtgaccctgggcaggtcactgactcttcgggcgctttggcatcctcgtttgaaaggggctgttatcctgcagccttgctggtcggtgagggtgagggtgagagggatctgtgcacctagcaccgtgcatggcacgtggtaggcgtttggtacatg

SEQ ID NO: 2892 - DNA, 69 bp, Homo sapiens
  source 1..69: mol_type = other DNA
cccaggagttcaagaccagcctgggaaacagagtgaaactccatctctacttaaaaaaaaaaaaaatta

SEQ ID NO: 2893 - DNA, 175 bp, Homo sapiens
  source 1..175: mol_type = other DNA
ggatgcaaattggttcttcagtaaggataaaaaaaaatcacaagcagttgtttgtggccctcctaaggcccacagcacatatagtgtgtctgtgatattccattttcatggcagggagtgatcaggaagaaggcttcctaggggactggcgatttaaaccagttgagaaacactg

SEQ ID NO: 2894 - DNA, 73 bp, Homo sapiens
  source 1..73: mol_type = other DNA
gtggttctcgaagaatgcggcctgcagatcctgggagtcccaagaccctttcagggaggatctgtgaggtcaa

SEQ ID NO: 2895 - DNA, 290 bp, Homo sapiens
  source 1..290: mol_type = other DNA
cgcagtggctcatgcctgtaatcccagcactttgggaggctgaggcgggcggatcacctgaggtcgggagttcgaggccagcctgaccaacatggagaaaccccgtctcttctaaaaatacaaaattagctgggcatggtggtgcatgcctgtaattccagctactcgggaggctgaggcaagagaatcgcttgaatccggtaggtggaggttgcagtgagccgagatcataccattgcactccagcccaggcaacaagagtgaaaccctgtctcaaaaagaaaaaaaaa

SEQ ID NO: 2896 - DNA, 556 bp, Homo sapiens
  source 1..556: mol_type = other DNA
ttgaccttgagaatttataatattctgagaaaactggaagcatgcataaagcccctctgctgtgcactgaagtatgggtgccttgaggaaaagcagttacacagttgagttgcaagctgaattggctgtgttcaaggcatgccctttagaattgaaagaactagcagattacggtatttagacttgaatatttggctgatattttctggaaattaatggaatgagcctctcacctcaagggaaacaactgatagtgttgccagtgataaagctttcaagcaaaaattggaatttccgaaaatctgtactccaccatgagctttattgttggggatattaacaaatgtgatttgtataatgaaatgcatttcatttggaagaattcaatgaaccatttttccaagtgaccagtacgtgatgttacaaaatcatgcatggctcaaagattgattcaaaagtgtaagacaggccagtggattttaatgtattaacaatataagagtgcattaagttttcggagtctacattgcctttaagaaactatgacttgtagtaa

SEQ ID NO: 2897 - DNA, 303 bp, Homo sapiens
  source 1..303: mol_type = other DNA
ccgggcgcggtggctcacgcctgtaatcccaacactttgggaggccaaggtgggtggatcacaaggtcaggagttcaagaccagcctggccaatatggtgaaagtccgtctctactaaaattacaaaaattagccgggcgtggtggcagatcccttgtagtcccagctactcgggaggctgaggcaggagaatagcttgaacccgggaggtggaggttgcagtgagtcgagatcgtgccactggactccagcctgggtgacagagcgagactccatttcaaaaaaaaaaaaaaaaaaaaaaaa

SEQ ID NO: 2898 - DNA, 239 bp, Homo sapiens
  source 1..239: mol_type = other DNA
cacttgtagtcttggtgtggtatcaaagaatagccacaattagctgaaaaggctattttaaaaacttttccaactgcgtatctgtgtgaagtcaacttacttcaacaaaaaagtttggatgtagaagcagctgtaagaattcaactgtttattataacaagatactaaagagactgtaaaatgccacccttctccttggattgttttggaagttattcttcataaaaaatgttaacgtg

SEQ ID NO: 2899 - DNA, 129 bp, Homo sapiens
  source 1..129: mol_type = other DNA
gctgggcatggtggctcatgcctgtaatcccagcactctgggaggctgaggtgggcggatcacttgagctcaggaattcaaggtcagcctgggcaacatggctaaactctgtctctattaagaaaaaaa

SEQ ID NO: 2900 - DNA, 3786 bp, Homo sapiens
  source 1..3786: mol_type = other DNA
agcaggggttacaatcctagtctctgatgaaacagacttgaaaccaacaaagatcaaaagagacaaagaagggcattacataatggtaaagggatcaatgcaacaagaagagctaactatcctaaatatatatgcacccaatacaggagcacccagattcataaagcaagttcttagagacctacaaagagacttaaactcccacacaataatagtgggagactttaacatccactgccaatattcgacagatcaacgagacagaaaattaacaaggatattcaggacctgaactcagctctggaccaagcaaacctaatagacatctgcagaactctccacccctaatcaacagaatatacattcttctcagcaccagatcacacttattctaaaattgaccacataattggaaggaaaacactcctcaacatatgcaaaataacagaaatcataacagtttctcagatcacagtgcaatcaaattcgaactcaggattaagaaactcacttaaaactgcacaactacagggaagttgaacaacctgctcctgaatgactactgggtaaataatgaaatgaaggcagaaaaaagatgttctttgaaaccaatgagaacgaagacacaatgtaccagaatctccgggacacatttaaagcaatgtgcagagggaaatttatagcactaaatgctcacaagagaaagcaggaaagatctagaatcgacaccataacatcaaaattaaaagaactagagaagcaaaagcaaacaaattcaaaatctagcagaagataagaaataactaagatcagagcagaactgaaggagatagagacacaaaaaacccttcaaaaaatcaatgaatccaggagctgtgtttttgaaaagaccaacaaaataaatcactagccagactaataaagaagaaaagagagaagaatcaaatcgatgcaataaaaaatgataaaggggatatcaccatttatctgacagaaataaaaaactaccatcagagaatactataaacacctctacgcaaataaactagaaaacctagaagaaatggataaattcttggacacatacaccctcctaagtctaaatcaggaaggagtcgaatccctgaatagaccaataacaagttctgaaattgaggcagtgattaatagcctaccaaccaaaaaaagtccaagaccagacagattcacaaccaaattcaaccagaggtacaaagaggagctggtaccattccttctgaaactattccaatcaatagaaaaagagagaatcctccttaactcattttatgaggccaacatcgtctgatccaaaacctggcagagacacatcaaaaaaagaaaatttcaggcaaatatccctaatgaacatcgatgcgagaagcctcaataaaatctggcaaaccaaatccagcaccacaccaaaaggcttatctaccacgatcaagttggcttcatccctaggatgtaaggctggttcaacgtatgcaaatcaataaacgtaatccatcacataaacagaaccaacgacaaaaaccacatgactatctcaatagatgcagaaaaggccttcgacaaaattcaacaccccttcatgctaaaaactgtcaataaattaggtattgatggaacatatctcaaactaataagagctatttatgacaaaccaacagcgactatcaagctgaatgggcaaaaactggaagcattccctttgaaaactggcacaagacaaggatgccttgtctcaccacccctattcaacacagtattggaagttctggccagggcagtcaggcaagagaaagaaataaagagtattcaaataggaaaggaggaagtcaagttgtctctgttcgcagatgaaatgatggtatatttacaaaaccccatcatctcagctcaaaatatccttaagctgataagcaacttcagcaaagtctcaggatacttcactgtgcaaaaatcacaagcgttcctatacgctaataacagacagccaaatcatgagtaactcccattcacaattgctacaaagagaacaaaatacctaggaatccaacttacaagggatatgaaggacgtcttcaagaagaactacaaaccactgctcaaggaaattaagagaggacacaaacaaatggaaaaactttccatgcttatggataggaagaatcaatatcgtgaaaatggccatactgcccaaagtaatttatagattcaatgctgtccccatcaagctactattgacttttcttcacagaattgaaaaaaactactttaaacttcatatggaacgaaaaaagaacccacgtagccaagacaactctaagcaaaaagaacaaggctagaggcatcatgctacctgacttcaaattattctgcaaggctgcagtaaccacaacagcatggtactggtaccaaaacagatacataaaccaatagaacagaagtgaggcctcagaaataacaccacacatctacagccatctgatcttttgacaaacctgacaaaaacaagcaatgcagaaaggattccctatttaataaatgatgttgggaaaactggctagccatatgcagaaaactgaaactggaccctttcgttataccttatacaaaaattatctcaagatggattaaagacttaaaacgtaaaacctaaaaccataaaaatcctagaagaaaacctaggcaataccattcaggacgtaggcatgggcaaagacttcatatctaaaacaccagaagcaatggcagcaaaagccaaaattgacacatgggatctaattaaactaaagagtttctgcacagcaaaaggcactatcatcagagtgaacaggcagcctacagaatgggagaaaattcttgcaatctatctgacaaagagctaatatccagaatctacaaagaacttaaatttacaagaaaaaaaaaccatcaaaaagtgggtgaaggatatgaacagacacttctcaaaagaagacatttatgcggccaacaaacatatttaaaaaagctcatcatcactggtcattagagaaatgcaaatcaaaactacagtgagataccatctcacgccagttagaatggcgatcattaaaaagtcaggaaatgacagatgctggagaggatgtggagaaataggaacgcttttacgctgttggtgggagtgtaaattagttcaaccattgtggaagacagtgtggtgattcctcagggacctagaactagagataccatttgacccagcaatcccattactgggtatatacccaaaggactataaatcattctgctataaagacacatgcacacatgtgtttattacagcactactcactatagcaaagacttggaaccaacccaaatgtccatcaaagatagagtggataaagaaaatgtggcacatatacaccatggaatactatgcagccattaaaaagggtgagttcatgccctttgcagggacatggatgaagctggaaaccatcattctcagcaaactaacacaagaacagaaaaccaaacacctcatgttctcactcataagtgggagttgaacaatgagaacacatggacgcagggaggggaacatcacacgcctgtcgggggttgggcggctaggggagggatagcattaggagaagtacctaatacaggtgatgggttgatgggtgcagcaaaccaccatggcacatgtatacctgtgtaacaaaacttcacgttctgcacatgtaccccagaatttaaagtatattaaaaaaa

SEQ ID NO: 2901 - DNA, 301 bp, Homo sapiens
  source 1..301: mol_type = other DNA
ccaggcctggccaagatcacaggcccccatcccctcttccacagggactggtccaatgcaagggcaggtgatcctgggaagaccagagtccttttatagatttgatttgtggaccctgaaaaaggaagttctctctctcccttttgaatcatggataataaggatgtggacttggagctgacactggcccattatgtagagcgggccagactgaaaatgtaaccaggaaacaaaaacagtccgaagatgatggtaaagagcctgggcaacacaatctggggcctagcatcagctatgcctg

SEQ ID NO: 2902 - DNA, 116 bp, Homo sapiens
  source 1..116: mol_type = other DNA
agcacgatagagcaccaggctaagaggcacgagatcaaggcggtagtcacttccgctctgcagctagcatttcaaccatatgtggatcctttcatttctcagctccctggattcct

SEQ ID NO: 2903 - DNA, 2360 bp, Homo sapiens
  source 1..2360: mol_type = other DNA
aggcatacctcattttattatgcttagcagatactgcatttttcaaaacaaattgaagatctatggcaactctgcattgaacaaatctgttgatgccatttttccaacagtgtatgctcactttgtatttctatgtcacattttggtaattcttgcaatatctcaagcttttttattgttactgtatctgtgctgatagtctgtcatcagtgatctttgatgttactatggtaatgttttggggtgccacaaactgtggtcataaaagactgtaaacctgtgtgtaataaatgtgtatgctctgattcctccactaaccaattgttcccctgtttctcttgctgtccttggcctccttattcactgagacacaaaaatattgaaattaggccaattaatgactctgcatcttcaggtgaattgaagagttgcaaatctctcactttaagtcaaaagctagaaatgattaaggttagtgaggaaggcatgtcaaaagctgagatgggtcaaaaggtaagcctcctacaccagttagccaagttgtgaatgcaaaggaaaagttcttgaaggaaattaaaaagtgctactctagtgaacacacagatgataaggaagtgaaacagcttggtatggggatagaacatctgatataacactcagtgttaaggatcccaatccagagcaagatcctaactctctttaattctgttaaggctgagagaggtgaggaagctgcagaagaaaagttgaatctagcagagattcattcatgaggtataaggaaagaagctgcctccataatataaaaatgcaagaagaagcaacaagtccttatggagaagctgccacaagttatccagaagatctagctaagatcactgaagaaggtgactacactaaacaacagattttgaaggcagacaaaaatggccttctgttggaagatgatgccatctaggactttcatagctggccaggagaagtcagtgccttggcttctgagaacatgctgactctcttgttagaaactaatgcagctggtgattttcaattgaagccaatgcttatttatcattcaaaaaatcctatggcccttaggacttatgctaaatctactcttcctgtgccttataaatgggacaacaaagtctagatgacagcacatctgtttacagcacagtttactgaatactttaatcccactgttgagagctgctgctcaggaaaaaatattcctttcaaaatagttttgttctatgacaatgcacctggtcgtccaagggttctgatggagatgtacaaggagattaatgttttcatgcctgctaacataatatccatactgaaactctttattatttaaggaatacattttataaggctatagctgccatagatagtgattcttctgatgaaccggggacaagtaaattaaaaacctttagaaaaccttctccatcaggatttgttgcttttgaaatctgggtcaagtaaattaaaaaccttctagatgccattgggaacatttgtgattcatgggaagaggtcaaaataacattcacaagagtttggaagaagtatattctaaccctcattgatgactttgaggagtttaagacttcatcggaggaagtaactgtagacttggtagatatatcaagaaactagaattagaatggtgcctgaagatgtgactgaattgctgcaattttatgataaaactttaacggatgaggagttgcttctgtggatgagcaaagaaagtgatttcttgagatgaaatcttctcctggtgaagaagctgtgaacattgttgaaataaggacaaagaattaggatattgcataacttatttgataaagcaacttcaaggtttgagaggactgactttaattttgaaagctctactgtgagtaaaatgtgattaaacagcattgcatgctacaaagaaatctttcatgaaaggaagtcaattaatgcagcaaacttcattgccatcttattttaaggaattgtcacagccacctcagtcttcatgagccatcactctgatccaacagcagccttcaacatcgaggcaagaccgcccaccagcaaaaggatatgactcatctaagtctcagataatcattagcatttttgcaataaaagtacttttaaattaagttatttacattttttagacatagcactgctatacagttagtaaattatagtatagtagtgtaaacataactttcatatgcactgggaaaccaaaaaacttgcatgactcactttattgtgatttgccatttattgtgttatttgctctattgaagttgtttggaaatgaaccttcggtatcttcaaggtatgcc

SEQ ID NO: 2904 - DNA, 1072 bp, Homo sapiens
  source 1..1072: mol_type = other DNA
ctcccaaaaacaaaaacaaaaacaaaaaaaaacaacacacatgataggaaaaaaattttgcaaattatatatctgatatagaacttgtattcagaacatataatgaactcttacaactcaataagactggtaacccaattaaaaattctttttaaaaaaaccaatttaaaaataaaggcaaataacctaatttttatataactcaaagtttttaaagaaacaaaccaatttaaaagttccaaaggatttgaataaacgtttttccaaagaagatatgtaaatagccaataaacgcataaaaacgtgcataacaccattagctattaggaaaaggcaaatcaaaaccacagtaaaaagcagcttcaaagccactacatggttgtggtcaaagagaccacaaataacaaattggaatctttatacatagctggtgggaatgtaaaatggtgcagctgctttggaaaacagtttcacaagttttcaaaaggttagacctaccatataacctagcaactctactcatatttatatgtcagctacaaataaaaacattaagttcaccaaaatatttacacatgaaagttcatagcatcattattaaaatcagaaaaaaatatattaaaaaaaacctcaaatgtccatcaactgacgaatggataatcaagatatagtgttagtctattcatacaatggaaaatgaacgggcataaaagagaatgacatgacccgtgctacaatgtggagcaatcttgaaaatgtgctaagtgaaagaagccagcaagccatgctgaaacaagtcagcattcatacaatatgattcaatttatatgaaatacccagaacagaaaaatgtatagagacaggctgtagattagtggttgtctagggctgggggcaatagaaggcagagtgactgctaataggaagtttccttggagggatcatgaaaatgttctaaaatcagattatacgtccatttgcacaattttgtgaatatactcggaaccactgaattgtatactttaagtgggtgaggtatgtgaaaattaaatgtcagtaaagctgtttaaaa

SEQ ID NO: 2905 - DNA, 121 bp, Homo sapiens
  source 1..121: mol_type = other DNA
cagagagcaaggagcaggtgggttataatggagtccctgcaccaagcagagcctgatgcccgcccttgctctgaacttcctagttatgtgaaccaaccaccaggccagttgggttgggttt

SEQ ID NO: 2906 - DNA, 157 bp, Homo sapiens
  source 1..157: mol_type = other DNA
ccaggcctggtggtgcactcccagctattctggaggctgacgcgggaggactgcgtgagctcagcagtttgaggctgcaatgagccatgatttcactactgaactccagcctgggcaaaagagcgagaccctgtgtctcagaaaaagagagagagaa

SEQ ID NO: 2907 - DNA, 386 bp, Homo sapiens
  source 1..386: mol_type = other DNA
ccccaccttcttacaacaacaatagcagtttccccgtgaggattcacccctcctcccctctcactccgcctttttccagggaagctgactctaccctttggaccacagcttggagcacttgaccctggctaagctggtcagggcagcgggtctccctcccctgaagcctcatgattggcatgaggacaacacgtgacctatgtgtggctgcccaggacccacataggcttaacggtgggattttgtttgactgtgtgataagtgggttcttccttccctgctgagtgtgaagataaaaaagacttgaggtctggggcccacttggagcctgtttgagaatgaagccaagttatgggaagcaacaaaactgaagagacagcaaggaa

SEQ ID NO: 2908 - DNA, 323 bp, Homo sapiens
  source 1..323: mol_type = other DNA
aaagctgaatgagtctgagcattagatcatgaatgtgtcagtgctgattttcaaaatggaatagtgattatgtgcgatattgcccttgtttttaggaaaaacacactgaagtgtttactttcaaaagattcaggcaaaaaatgcatatacagtacatatacacacacccatattcacattcggaaagtgagctggggggaacaaacagggcaaaatgttaacatctgtgctaacatctgagggatctgggtgaaagatctacagggatgccctgtgctattttgcagctgctctgtaagtctgaaattacgggagaataaaaa

SEQ ID NO: 2909 - DNA, 368 bp, Homo sapiens
  source 1..368: mol_type = other DNA
ttgctatgtattagccgatgtctttagtgttgagcctctggattctggggtctgggccagtggccatagtgaagcctgggaatgagtgttactgcagcatctgggctgccagccacagggaagggccaagccccatgtagccccagtcatcctgcccagccctgcctcctggccatgccgggaggggtcggatcctctaggcatcgccttcacagccccctgccccctgccctctgtcctggctctgcacctggtatatgggtcatggacccagatggggctttccctttgtagccatccaatgggcattgtgtgggtgcttggaacccgggatgactgagggggacactggagtgggtgcttgtgtc

SEQ ID NO: 2910 - DNA, 411 bp, Homo sapiens
  source 1..411: mol_type = other DNA
tggtttggatgttttgtcccctccttaatttatgttgaaactctacataaactgtttactgttgaaacagtgtaagtattaggaggtgggacctttgggaagtgattaagtcaagtcacgaagatagagctttgcgaatgggatcaggtgcccttatgaaaaggcttgatagagggagtttgtcctgtggcccttctattttctgctctgtgaggacacaatgctcctcccttccaaaagatgcagcatgaaggcatcatcttggaaacagacatgagccctcaacagacaactgcacctactgatgttttgatgttgaacttcccagcctccagaactctgggaaaataaagtcctctttatacatttcctagtcagtggtattttattataacagctcaaatagactaa

SEQ ID NO: 2911 - DNA, 79 bp, Homo sapiens
  source 1..79: mol_type = other DNA
tgtatttgtgccaggctgtgctttctaaggactgctcttagccagtgactgcagagcagggataccaaggcaggcctgt

SEQ ID NO: 2912 - DNA, 285 bp, Homo sapiens
  source 1..285: mol_type = other DNA
ggctggtcacagtgtctcaatcctgtaatcccaatagtatatcacctgaggtcaggagtttgagagcaggctggccaacatggtgaaaccccatctctactaaaaatacaagaaattagctgggcatcagtggcagacacctgtagtccaagctacttgggaagctgaggcatgagaatcatctcaacccaggaggtggaggttgcagtgagccactgcactccagcctgaatgacagagccagactctgtctcaaaaacaaaaaaattgaaattaaaaaataaa

SEQ ID NO: 2913 - DNA, 484 bp, Homo sapiens
  source 1..484: mol_type = other DNA
atatatatggaaaagagaaggtccaagaatatcaaagacattgaagaagaggaaagatttgtcctgccaaatatcagaacttttataaagctacagcaattaagacagtgtggtcctcactgataaactgactaatgaaacagaatagagagctcccaagcaaatctctacaaatttaatcttcgatacgtgatgtaggtgacatggcagatcagtaaggaaagaaaggacttttcaataaatagaatagaaaaataatggttattgatataagaaacaaaatgaaattatattcctacttcactctatatacaaacattaaattccagaggaccaaagacttacatgtcagaaacaaaactttaaaacttttagtagaaaatgtaagtgaatgggacacaaaaagccatttaaccattaaaaaagattagacattttgactatcacaaaattaagaactttttacatcaaaaagtggaaagat

SEQ ID NO: 2914 - DNA, 1282 bp, Homo sapiens
  source 1..1282: mol_type = other DNA
tggtgcaggggaggttgtgtgagggctacctgggcggtggagctttggccttggggtgaattttgcagaaacctatttgttgctctggcaggaatttcaaattttggatccggtcagtcacaagccgcctcctgtttcccaagtgttctttaatttttcattgctgtgatggaaatgtcacttgaccctcccttccaccgggcacatgcctagacagcatcgtttgtttcgccgtcgccccacattcctctggttacacacattcaagccatctgctgtgggattggtcagtgccacacgtcaacgcatggtctccacctgggattcgcccctgttcctgtttgcacgtgtcctgtaaattgcgattggcttccagagccccagggcttttagaagcccggcaggccagtgttctttaaaaggagaagggaggcagagggctgatggatcagtgaaatttcagctgacagcatgccttgagacccatgggatcattgtgtgctgcagcgaggccctgcctgcctcaccagatgtggtgagcccatcctatctcactcggtgggggccaaaatcagatctgaaggggagtcctgagaacacagcaggcgtcctgaagctccccctccctccctcggtggaagtcggctcaaggagtttctgaggacaggactcctgggggtttggccgtgggacagaagaagacacccgcggtcccctctcccacgccgacccaaactggagcccggatccagccgccgccgcggctgcagcaggagcctccctgccgccgcgctgcggtggcgttatttaaaggggacgcagcctgaccgccaggagcggagcgccagtcgggtgggccaatgcgcatgcgcgaggcgcgagcgccttctcccgtcacagtggttcccacggttgtcttagaaaccagtccccgaggcttggcaaagcaggagcgctccgtggcagtgcttgtgtgtcggggctctgaggctccggcctgacctctcctcggggtcgacgggaaggtctccggatgccaggactcgcaaagggccgaccagaatgaggaaatcccaggcggagtccgggggaggcagcacggcatcccagcctcagggctgcccggacggtgttggttggggtgagtctcgccaaaagtcgtgccgcggtgacctccaggacaggtcggcctgagtacccctgcggtgctccctcacccgagtgtcgatctcgtcaagagcagaaccccgaagcctcaggggttgccttggggtgtgtgttt

SEQ ID NO: 2915 - DNA, 266 bp, Homo sapiens
  source 1..266: mol_type = other DNA
gctggtcacagtgtctcaatcctgtaatcccaatagtatatcacctgaggtcaggagtttgagagcaggctggccaacatggtgaaaccccatctctactaaaaatacaagaaattagctgggcatcagtggcagacacctgtagtccaagctacttgggaagctgaggcatgagaatcatctcaacccaggaggtggaggttgcagtgagccactgcactccagcctgaatgacagagccagactctgtctcaaaaacaaaaaaa

SEQ ID NO: 2916 - DNA, 198 bp, Homo sapiens
  source 1..198: mol_type = other DNA
gtgatgggaagattacagtctgagggccaaacgtgcctgcttcctgtttttgtaaataaagttttgttggaacacagccacacccactcattgacttctttttactacagtggcaaaggtgagtagttgcaacagagaccatatgaatcccaaagactaaaatctttaactttttacaggaaaagtgtagtgatctct

SEQ ID NO: 2917 - DNA, 34 bp, Homo sapiens
  source 1..34: mol_type = other DNA
taagggctcaataaatgttagctgaatgaatgaa

SEQ ID NO: 2918 - DNA, 722 bp, Homo sapiens
  source 1..722: mol_type = other DNA
atatgttcagaatctaatcatttcccacctccttcaatgcaatggcctttgtctcttgggagaggagggcactggagtcctagtctaggggagcccagcaccccagtctctcgcctgcaaccctgttaacagccctgcactggtctctctgctttcaccctttctctctccaacctcctcagcactggccagctagagaggtccttcagaatgtgaatcagctcatgcccctcttctgctcagaaccctaggaggcttcctgtatctctccaactaaaagcttcctgccatggccgtccaggctgcagaatgtcagctcgcctgctctgacctgctgctcggttccctgcctatgcctgcctctccagccatgctggcctcctggctgctcttcaggaacacactccagtctcggggcctttgcacgtgctgttttctctgccaggaatgtgctccctccctccttcatgacagctcttcagagaggtcttacctgggctcatctaaaatagatccactccctctttttgctcccaaaccctttatatttctttatagcacttattaacatgtcccacagtacatttattacatcttctactttctagaatgcaaattccttgagaacaaagactttacgcttgattctctcctgtatccccagtacctagcatagagcctgacacatagtaggtgatgaacaaacacctgctgaatgcaag

SEQ ID NO: 2919 - DNA, 307 bp, Homo sapiens
  source 1..307: mol_type = other DNA
gccgggtatggtgactcatgcctgtaatcctagcactttgggaggccgaggtgggtggaccacctgaggttaggacttcaagaccagcctggccaacatggtgaaaccccatctgtactaaaaatacaaaaatttgcctggtgtggtggtgcatgcctctagtcctagctactcgggaggctgaggcacgagaatcacttgaacctgggaggcggaggttgcagtgagtcgagataacactactgcattccagcctgggtgacagagtgagactccccctcaaaaaaaaaaaaaaaaaaaaaaaaaa

SEQ ID NO: 2920 - DNA, 311 bp, Homo sapiens
  source 1..311: mol_type = other DNA
ggccgggcatggtggctcacacctgtaatcccatcaatttgggaggctgaggcaagcagatcacttgaggtcaggagttcaagaccagcctggccaacatggcgaaaccccgtctctactacaaatacaaaaatgagccaggcgtagtggcgggtgcctgtagtcccagctactcgggaggctgaggtgggaggatcgcttgaaaccaggaggcggaggttgtagtgagctgaaattgtgccactgcaccccagcccaggcaacagagtgagactcagtctttaaaaaaaaaaaaaaaaaaaaaaaaaaaa

SEQ ID NO: 2921 - DNA, 906 bp, Homo sapiens
  source 1..906: mol_type = other DNA
aacagggaccagatttaccctctcaccttaaaccactaaaataactaacaaaacatgaaactatagctttcaagatgctgcgcagcaggcaatgagagacagtaatccccaaaggaagagaaacaaagatatgagtcctatgatggccaaacttagtgcctgaagagagtttcctgggcaccatgcagaagcagaagccctatggaggctgcagaactcaaaattgaagacagcgagctcagctcagagtgcaggacttaggcagctagaattcatgggacaataccacacagtagagggctgaggagatctagagaggtactcactgagtactgagtggcccatagtgtgatgaaactacccaagaccatgggcagcaaggagaggaaaacaacacccaaaagaattatgaacagtactctgcccttacccactcaagtagctattagactggaaatctcaagacaaccctcaagatttgggaagaatcttgtctcagaagtgaggaagaattagccataaaccaactactacaccgttcccagctaacaaatcttacaaacaagacctaaaggaatcaacggttttcaagtgacttaactgcatccaataacaaagttaaagaacatatgtagaaatacaaatatccccagcacccaacgaggtaaaactctctatgtctgaaatccaatcaaagatcaccaggcaagaggcaaggaaaaaaaagtatactaaagagaatagtcaattgcaaccaaccctgaaatgacacagatgttagaatgagtacacaaggacattataagagttatatctgcatttcatatattcaaaaacttaagtagagacaggaaagatttttttttaaaccaaatcaaaattctaacgataaaaaaaggtaaaata

SEQ ID NO: 2922 - DNA, 302 bp, Homo sapiens
  source 1..302: mol_type = other DNA
ggccgggtgcagtggttcacgcctgtaaacccagcactttgggaggccgaggcaggtggatcacaaggtcaggagtttgagaccagcctggccaacatggtgaaatcctgtttctactaaaaacacaaaaattagccaggcacggtggtgcgtgcctgtaatctcagctactcgggaggctgaggcaggacaatcgcttgaatctgggaggcggaggttgcaattagccaagatcgcaccacagcactccagcccgggcgacaacagcaacactccgtcttgaaaaaaaaaaaaacaaaaaa

SEQ ID NO: 2923 - DNA, 170 bp, Homo sapiens
  source 1..170: mol_type = other DNA
acctgcctggggcagggttcaaaacagatatagctggtttattttggaaacaagtctcatccagaaatgttatttactgcatttaaaaaccatggaaggcgatttgcatggttcctccccacgccctcactcccaccaagtacagctttaccacccaaggtcctttcagg

SEQ ID NO: 2924 - DNA, 85 bp, Homo sapiens
  source 1..85: mol_type = other DNA
tcaggagacctggattctggtccctgctgtccctgcctggctgagcgacccagggcaggtcccgtccctgtctgggtgggcctca

SEQ ID NO: 2925 - DNA, 166 bp, Homo sapiens
  source 1..166: mol_type = other DNA
agtacctgggactgtgggctctggagcctgaccacttggactggagtcgtggacacactgcttcctggaggcgtgaccttagacaagtgcttccacctttctgggtctcagtttcctcatctgtaaaacagacctaataatcatacttctttcatacagttactgt

SEQ ID NO: 2926 - DNA, 84 bp, Homo sapiens
  source 1..84: mol_type = other DNA
ggctgaagtggagagatcgcctgagcccaggaggtcaaggctacagtgagccgtgactgcaccactgcactccaccctgggtga

SEQ ID NO: 2927 - DNA, 119 bp, Homo sapiens
  source 1..119: mol_type = other DNA
atctggaaccttacttctctgggaatcttacctatctggcacgtgggaaggaagaaaaaaggctactgagtaccctgaaatgtcacgaagttgatgcaatgaaactcacacatctcact

SEQ ID NO: 2928 - DNA, 77 bp, Homo sapiens
  source 1..77: mol_type = other DNA
tgcatgaccttgggcaaacccttgccctttcaagccatcagctcctgcctctctgccatgagggctttggatcagat

SEQ ID NO: 2929 - DNA, 174 bp, Homo sapiens
  source 1..174: mol_type = other DNA
aagagctggcccaggaggaggctgaagatgtgtttctagttcctgcatgctgctttgttgtgtgacctcggacatgtcacctccagccttcttcacccacctcacctatcaactagggctagtaattgcctgtggtgggtgggctggggggctctgatgccaaaatgcaggtag

SEQ ID NO: 2930 - DNA, 822 bp, Homo sapiens
  source 1..822: mol_type = other DNA
gtgatattgtgaaatatatagttggtcttcaactcccttcctggcatacaactcctaaaatctttggcctttccaaagtggtgtcattttgtatgctaatgattggtggctggcgcacttaggtagcttcagggtaggggctggtcactgaaaaaccaagggaggattagaaggttaggactttctgtcccatctcccaacctccaaggagggcagagaggctgactgatttccaatggccagtggtttaatcagttgtgcctacataatgcagcttccataaaacccttaaaaggactgggtttggggcacttccagatagctgaacaggtggaggtttctggacagctgcacaccaggaaaggtatggaatctcctcaccccttcccccatcttgtcctatgcatctcttcatctgtatcccttgcaatatcctttataataaaccggtaatgtaataagtgtttccctgagttctgtgagccgctccagcaaattaattgaaccaaagaaaggggtggggaaccccaatttataatcggttggccagaagcacaggtaaaacagcctggagcttgcaattggtgtggcaagttgggggcagtcttgtgggcagagccctcaacctgtgggatctgacactatctccgagtacacaatgttggaattgaattgggttagaggacacccacctggtgacctctctccagaattgactgcctgtttgctgtgtggggagaaactcccacaaatgtgtcacagaaaccttctgtgtaattgtaattgagtgagagagctgaaaaaatactttttttctctata

SEQ ID NO: 2931 - DNA, 131 bp, Homo sapiens
  source 1..131: mol_type = other DNA
gtgaccttgggcaagtcacttgacctctgtgtgcctcaacttcctcctctgtaaaacggggacagtccctgcccctccctacctcacaggcatgttgtgagaataaatgaggtaacgtgtaccaagggctt

SEQ ID NO: 2932 - DNA, 316 bp, Homo sapiens
  source 1..316: mol_type = other DNA
ggctgggcgcaatggctcacgcctgtaatcctagcattttgggtgactgaggcgggtggattgcttgagcccagaagttgaagaccagcctgagaaataaggtgaaaccctgtctacaaaaaatacaaaaagttagctgggtgtggtggcgtgtgcctgtagtgctagctactcagaaggctgaggtgggaggattgtttgagcccaggaggttgaggctgcagtgagttctaattgcgccactgcactccagcctgagcgacagagtgagacactgtcttaaaaaaaattaaaaattgtaaaaaaatgaaaaaaa

SEQ ID NO: 2933 - DNA, 248 bp, Homo sapiens
  source 1..248: mol_type = other DNA
tccaacttggccactaaaatgtttccttagacttggtcctaaatgatttttggattgtttcaaaacctgaaaaacaccttcacaggataaagataaaagaatgggccactggatctgaagatcatttcaaaaaagaagtttgaactttcaagcattttgcacattcctgggaaaattgtctatacaatattcatttggatgtacaaattccatcactttttgaaaaaagtcaaagtgttctacagtca

SEQ ID NO: 2934 - DNA, 299 bp, Homo sapiens
  source 1..299: mol_type = other DNA
ggctgggcatggtgggttacgcccaaagtgtaagcccaacactttgacaggccaaggcagaagcatcacttgaacccaggagtttgaaaccagcctgggcaacagagtgggaccctgttgctataaaaaatttaaaaattagccggacatggtggtacacacctgtagtcccagctactcagaaggctgaggcaggagaattgctccagctgggaggtctaggctgcagtgagccaatgagtcgtgattgcgccaccctgagtgacggggtgagagatcctgtttaaaaaaaaaaaaaa

SEQ ID NO: 2935 - DNA, 165 bp, Homo sapiens
  source 1..165: mol_type = other DNA
actttctctgaaccccccttgcccctcactgatcttgcttttccctggtctcatgcagttgtggtcaatattgtggtaatcgctaattgtactgattgtttaagtgtgcattagttgtgtctccccagctagattgtaagctcctggaggacagggaccacctct

SEQ ID NO: 2936 - DNA, 296 bp, Homo sapiens
  source 1..296: mol_type = other DNA
gccaggcgcggtggctcacgcctgtaatcccagcactttgcggggctgaggtggttggaccacctcaggtcgggagttcaagaccagcctggccaacatagtgaaaccccatctctactaaaaatacaaaaattagctgggtgtatggcgcccacctgtaatcctagctgctcagggggctgagtcatgggaatcacttgaacctgggaggcagagtttgcagtgagccgagagtgcgccacttcactccagcctgggcaacagagtgagactccatctcaaaaaaaaaaaaaaaa

SEQ ID NO: 2937 - DNA, 122 bp, Homo sapiens
  source 1..122: mol_type = other DNA
tgataccactgcttctgttttcttccaacccattcttctcaaagcagccagcaaagaaaaataaaaaaaaatgtaaattagattatgtcacttctttttgcaatgtccaacaatgctaaaag

SEQ ID NO: 2938 - DNA, 354 bp, Homo sapiens
  source 1..354: mol_type = other DNA
cagtatccattctcttcccttcccttaccaagcgaacccctgaattctagctgaatatcttggctatacagtctcccctcaagctgaactgtagctgtgggaatcagttctggtccacaggaattaacggaagaagtgtgtacaatttttgagctatgctctttagaagagtgtggaggggtgtctttcttcccttcctcctgtgatgtgatggctggatggagctggaatggccattttgcaccatgaggaatctgggaatgaatggcagaatggtgagagaaacaatatgagcctctgaggactgtcgggagcagaacctccctatctggactccctgccatcaaatttgtt

SEQ ID NO: 2939 - DNA, 2327 bp, Homo sapiens
  source 1..2327: mol_type = other DNA
acaacatatcaaaatttgagagacataggtaaagtagtgctgagtgggcaattcatggtactaaacgcacacataagaaaataaaaaatctcaaatcaataatctaaactcctacatcaagaacccagaaaaagggcaagttaaaaattaaagaacagaaaccagttaaattgagaataggaaaacaatagagaaaaatcaatgaaacaaaaagctgagtcttttctttgaaatgatcagtaacactgacaaatctctaggaagaatgacaaaaaaaaaaaaaaaaaaaaaaaaagagaagacacaaattacctatatcaacaattaaataggagagatcactacagacactgcagacatcaaaaggataagaagggtatacacacatatacagacataaatttagtaacataaataaaacagaccaattcctcaaaaaacacaaactacaaaaactcacccaatataaaatagataatgtgaacagttttataactatcaaagaaactgaattagtcatttaaaaattcacaaaaaagaaagctccaggccaagaggcttttaccagagaattctaccaaaagtttaaataagaatgagcacaaatccttgacaatcttttgcagagaatgggagggaacatttctcaaggcattttttgaagccaatgcgaccttgatagcaaaaccagataaagacagtgtctggcaaatacagacagaaaaattcttaacaaaatattagcaagtagaatttggcaatatgtaaatagaattttacaacaccatgaccaagtaaggtttattcaagagatgcggggctggcttaatattaaaaaaaaaaaaaatcaatgtaatctatccatattaaatggctaaagaagaaaaatcacatgatcatattaactgatttaaaaaaaacacatttcacaaacatcagcacccagaaattaaaaaactcccagaaatagaaatggaagagaacttcttcaacatgttaaaaagcatctacaaaaaacaaaccggcaaaaaccaaccaaacaataacaacaaaaactgtacagctaatattattcttaattgtgaaagactgaatacttacccccctaagaccgggaacaaggcaggatatctgctctcaccactcttattcaacatagtgctggaagttctagccagtgcaataaggtagaaaagggaataaaaggcatacacatcagaaaggaagaaattaaactgagcctatttgccacatcaacatctacaacaacaaaatcccaaagaatcttcaaaaaaatttctaaaactaataaatgagttcagcaaggttgcaggataccagatatacatataaaaatcaactgtgtttttataaattagcaatgaacataggaacactgaaattataaatacaatgacatttacaattgttcaaaaaaagaaatacaaagaattaaatttaataagacattagatatgtacaggacttatatgctaaaaatgacaaaatgatgattagaggaatcaagtaaaatctaaataaatgcagagacatactatgttcatggatttgaagactcagcataggaaagatattctctccaaattgatatataggtttaacataattcctataaaaatcccagcaaattttttttttgtagatatagacaagtttaacaaatgtagacagaaagaaagacaaggaaataaaacagctaaagcaattttgaaaaaagaagactaaagggagaggaatcagtctattcaatgtaaggactcatcatagcctaatcaagacactgattggttttagcaaaaggatagacacataagtcaatggaacaaaatgaagaacccagaaatagacccacacaaataagcataaatgatttttgagaaatgtgcaatcctttctcaatggagagagtatatggtcttttcaacaattagtgctggaccaatgggacatccataggcaaaaaaattgaatcttgatcttaacctcacacacaaaaaaacaactcaaagtggatcatgaacttaaacttaaaatgcagaacaatgatacagttacaaaaaacctaagagaagatatttgggatctaggattaggtaaaaagctccagacttgacaccaaaagcaaggagtataaaaggaaaaattgatacactggacttcattgaaatgaaatgttttttttgctttgaaaaactgtcaagaggatgaagaaagaagctaaagactaggaaaaaaatatttgcaaaccgtatgcctgataaagggctaatatctaaacacaaaattcaatagtaaaaaaacaacca

SEQ ID NO: 2940 - DNA, 85 bp, Homo sapiens
  source 1..85: mol_type = other DNA
tgctgctgaatccaaagggcacttgcaagttcttatcgttcctgtctttacctctgtagctctcaacacagcagaccctctccct

SEQ ID NO: 2941 - DNA, 304 bp, Homo sapiens
  source 1..304: mol_type = other DNA
gccgggcgtggtggctcacgcctgtaatcccagcactttgggaggccgagatgggcagatcacttgaggtcaggacttcgagaccagcctggccaatatggtgaaaccctgtctctactgaaaatacaaaaattagccgggcatgttggccggcacctgtaatcccagctactcgggaggctgaggcaggagaatcgcttgaacccgtgaggtggagattgcagtgagccgagatcacgccactgaactccagcctgggcgacagagcaagactctgtctcaaaaaaaaaaaaaaaaaaaaaaa

SEQ ID NO: 2942 - DNA, 297 bp, Homo sapiens
  source 1..297: mol_type = other DNA
ggctgggcgcagtggctcacacctgtaatcccagcactttgggaggccaagggaggcggatcacctgaggtcaggagttcgagaccagcctgatcggcatggtgaaaccccgtttctactaaaaatacaaaaattagccgggcgtggtggtgcgcgcctgtaatcccagctactcaggaggctgaggaaggagaatcacttgaacccgggaggtggaggttgcagtgagctgagatcgtgccactgcactccagcctgggcgacagagcgaaactccgtctcaaaaaaaaaaaaaaa

SEQ ID NO: 2943 - DNA, 1450 bp, Homo sapiens
  source 1..1450: mol_type = other DNA
atgcaaggatggtttaacatacaccattcagttaatgcaatacatcacatcaacagaatgaagagcaaaaatcgtgtggtcatctcaataaacagaaaaagcatttgataaaattcaacattgcttcatgataaaaaaaaaacactcagaaaactgcatagaaagaagatagtaaaggccataaataaacccacagctagcatcatactgaatggggaaaagctgaaaatccttcttctgaaaactggaacatgacaaggatgcccactttcaccgctcctattcagcatagtactggaagttctagccagagaaatcaggcaagagaaagaaaaggcatccaaattggaaaagagaaaaattgtccctttttgcagatgacatgatctgatacttagaaaaaccaaaaatgctccaccaaaactcttaaagctggtaagcaaattcagcacagtggcaggatataaagttaacgtacaaaaatcagagtttctatacaccaataataaaatagctgaaaaagaaatcaagaaggtaatctgatttacaatagctaccaaaaataaaaaaagatacttacgaataaatttaatcaaggaagtgaaagatctctgcaaggaaaactgtaaaacactgatgaaagaaactgaagaggacacaaatggaaagacatcccaagcttatggattggaaaaattaatattaaaatggccacactgtccaaagcaatctacagattcaatgcaattgctatcaaaataccaatgtgattttttcacaggagtagaaaaaaaccctaaaatttgtacagaaccacgaaagagctaaaatagtcaaagcaatcctaagcaaaaagaacaaagctgtaggcatcacattacctgacttcaaaatatatcacaaggctatagtaaccaaaacaacatggtattggtataaaaatagacccacagaccaaaggaaaagaaaatagaacccagaaataaagccacatatttacagccagctgattttcaacaaaggtgccaagaacatgcaatgaggaaaggacaccctcttcaataaatgatgctgggaaaattagatatccataagcaaaagaataaaactggacctgtatctctcaccatatacaaaagttaagacagattaaagatttaaatataagaccttgaattatgaaactactagaagaaaacagtgcagaacacttcaggacattggtctgagcaacgattttatggctaagacctcaaaaacacaactaaaacaaaaatagacaaagggaactatattaaaaatcttctgcatagcaaaggaaataatcagcacagagacaatatgttgagtgggagaaaatatttgcaaaactattcatccaacaaaggactaatatctagaatatataaggaattcaacaaaaaatcatattaaaaagtgggcaaaaggt

SEQ ID NO: 2944 - DNA, 1406 bp, Homo sapiens
  source 1..1406: mol_type = other DNA
gagttttttgatttctgattactgcatttaatcactgagggggccagtgcagaggctgatcattgtctcaatgcccttgggcagagggagctttctagccacaaggggatttaaagagacagtacctatttttttttttctttattcctccttttggcaagccagatatttaaggaaatcttaggtcactggttaaccacagagatatcacaacagaaacttcactgaccccatactgcaaagaatacacacttcacaaaaatagttggaaaagtcacaaatagttggctccagccctcaataagcaaaaatcagcaatctctgaggcatgacagaattagattctcagttaccacaatgtaatactcataatgtccagttctcaacaaaaaattacaaaacataaaaagaaatagaaaaccatggtccattcacaggaaaaaaaattgacaggcaccatccttgaggaagtccagacattggaattattacccaaagacattaaatcaactatcttaagtatgttcagcgagctaaaggaaaacatggacgaagaactaaaggaaatcaggaaaaccatgcatgaacaaaatgagaatatcaataaagagatagaaattataaaaaggaaccaaacaaattctagagctaaaaagtataatccctgaaatggaaaacccactagagggattcaacaaagatttgggcatgcaaaagaagagaacagtgaatttgaagagaaaataattgaaattatccaaaggagaagaaagaaaaaaaatatttaggaaaaaaaacctgagagagctgtgagacatcatcaagcatactaatgtactcatatattcatatagttattatattcattagtatattcatactcatatactcatataggaatcgcagaaaaagaaaagggacagaaagaatatttaaagaaataatgatagaaaatttcccaaatctgatgaaagacatgaatctacacatccaaaaagctcaataaaatccaagcaggatgaactcagatccacaccaagacatgttatattaggattgtcaaaacctgaagacaggattttgaaagcagcaagagagaagcaactcgtcacacagaatttttgacaagattaacagccgattcctcatcaaaaatcttggaagcccaaaggcagtgagatgacatatctaaagtcgtgaaaaaaagaaaaaaaaaaaacctctaaaccaagatttctgtatatggcaaaactattcttcaaaaatgaaagagaaatccagacatttccaaataaaattgaaggagatcattattagtagacatgccctaccagaaatgctaaagggagtccttcatgctgaaatgaaaggatactgaacagaaacttgaagccataagaaaaaat

SEQ ID NO: 2945 - DNA, 451 bp, Homo sapiens
  source 1..451: mol_type = other DNA
catctcctagtgctcactctcatactgactgcttcatcacactggtctgctggccatgcttcagtctgcccagaaatattcctgctttggagccattgttcttgttccctctgcctggaatcatcttctcccagatagccaaatggctactgccctccttcttcaggtttctgctccaaagttaaactttcaaagatgccttgtatggtaccctcaattgaaaatgataccttaccataccctggaatcactctatccttctctattttttctatagcatttatcaccatccagccactgtagataaatttgattggctgtctccctgccttcccttcacacccagtaccttccctgcctgaaatcctcattgagggcaagaactttatccccaggatctaaaccagtgctggacaatagatgctcagtaagtatttgttgggtgaatgaa

SEQ ID NO: 2946 - DNA, 313 bp, Homo sapiens
  source 1..313: mol_type = other DNA
ggcctggcatggtagctcatgcctgtaatcccagcactttgggaggccgaggtgggcaaatcacttgaggtcaggagttcgagaccagcctggccaatgtggtgaaaacccatctctactaaaaacacgaaaattagccaggcgtggtggtacacgcctgtaatcccagctacttgggaggctgaggcaggtgaatcgcttgaacccgggaggcggaggttgcagtgagccgagagatcatgccactgcactccagcctgggcaacagaacaagaccctgtctcaggaaaaaaaaaaaaaaaaaaaaaaaaag

SEQ ID NO: 2947 - DNA, 224 bp, Homo sapiens
  source 1..224: mol_type = other DNA
gcagcagaaggaacagcggcctgggactccagagaactgggttccctctcatccctccagggccaccacttcttgtgggcccttgggcaagtcactgtactttctgagtctcagtttccccatttgcagaatggaaataactaccccggtctaccaacttagaagaattgctttgaggatctgataaggtggtgtggatgatgctgccttgggggctttacagt

SEQ ID NO: 2948 - DNA, 81 bp, Homo sapiens
  source 1..81: mol_type = other DNA
gggcctctactttctcctctataaaatgaggctggatgaaatgtcagctagggccattttggctgctgaggctctgggatt

SEQ ID NO: 2949 - DNA, 302 bp, Homo sapiens
  source 1..302: mol_type = other DNA
ctgggcgtggtggttcatgcctgtaatcccagcactttgggaggccaaggtgtgcggatcacaaggtcaggagttcgagacccgcctggccaagatggtgaaaccccatctctactaaaaatacaaaaattagctgggcgtggtggcgggctcctgtagtcccagctactcgggaggctgaggcagaagaatcacgtgaacccaggaggcagaagtggcagtgagccaagatcgcaccactgcactccagcctgggcgacagagcaagactctgcctcaaaaaaaaaaaaaaaaaaaaaaaa

SEQ ID NO: 2950 - DNA, 193 bp, Homo sapiens
  source 1..193: mol_type = other DNA
cagtgctgccagccgacctttctgtggtgatggaaatctttttctgtgctgtccaatacagcagccaccgaccacttttgcttattgagcacctcaatatagaggtggccactacaggtgaggaaatgaatttctaagttaattcaaattcaaatgccacatttggctcgtggctcctgtactggacaacaca

SEQ ID NO: 2951 - DNA, 129 bp, Homo sapiens
  source 1..129: mol_type = other DNA
gttgggcatggtgatgtgcgcctgtaatcccagctgctcaggaggctgaggcgggaggatcccttgaacccaggcgcttgagaccagcctggcaacttagtgagactctgtttcaggaaaaaaaaaaaa

SEQ ID NO: 2952 - DNA, 534 bp, Homo sapiens
  source 1..534: mol_type = other DNA
ctgccatcccctttatctctcttagttaatgccacccacccacaccaggctgcctcctgttttagacttggatgaaaccacacaccatgaggtgtggtaccagcttcctgaggggccagatggtggagccagatgatgcaacctggaagtgtgcgcaagttaactcaccgtgggtgaaccttgaatgaagggaaatggaaaatgagaaggaggtgggcagatgaattccccatcctttctctattctgtgcactatttcaaggttagtttctcctggtggtcctcccagagatgtcccatgtgctgacccacgtgctgaccccatgctcctgctgaggaaacttgcccctctttggggcttgtagtgagttggtgggcagcatgctaatgcctctcatatctcattgtttacatcctttctttcctcccttccttacttccctcaccctcactaccccggcttggagttcccagatggaatgatgcagaccaagtccttgccttaggatctgttttctagaaatcccaactaaa

SEQ ID NO: 2953 - DNA, 389 bp, Homo sapiens
  source 1..389: mol_type = other DNA
tgaagtccatcttaattctccttttcctcacgtcctaccatacctgtttgtcgagcttgctaatgttgtcacataaacatttcttgaatttgtcctttcacttccatctcctcctctcctgcctcagtttctcgtgggttgtcataatattagtagctttctcagcagtctgcttggccccttcctcttcccacctcaaggctgttcttcacactgaccaattcctccaaaatgccaacgtgatcatgtcttaatacagaaatgacttaagaggttccacgccacttgcagaatacaagttcagcatccttggtatgacctgtaaggctatgtatgtcatgaccgtttcctgcctcttctcagttcctaccactctggacctttcattc

SEQ ID NO: 2954 - DNA, 919 bp, Homo sapiens
  source 1..919: mol_type = other DNA
agtgatgtgctggagctggctttgccaagcttgtgagagctggttgctacattttcaggatttttacaagttggtaaacacagccattataaaaaattaaatgatttaaatttataattaagtaaattacattaaaacaaaaaaattatactcaaaattcattacttaattttactacctgttactattatctgtgcttttgaggctatttctacatagtaactcttatggagacctaggggagacaccgcgcatctcttcctgattccccactcaatgacatcatgttagtctttggttgcttaactggctgtggggagtgtttttgtatcacaaagattagagaggactacacatcagggcttgatttattgtttgttgattttctagacttcagaacatgctggataaaatgtcagtaatgcaaattaaactttaaagtatgtcttgtttgtagccaatacatggtgtatagcaccaaaaaatggagggattattcttccagtagttgaacactgtcatccgtttcagctgacagctgctcaaatcatttaagaaggagttctgacattcattttcattgttttacttttgtcttcctcactagtgtaaacaaaaatttcaaccagcattcatgccgaacctatacccattcttcagtgcctagctgtacagttatcagggatttttatttgtagtctaattttgtcaaatcatggccaaatcgcagtgatagttgactttggatacaaggtttggcaaaaaaaaaaatattaacaaaatattctgtaagaatcaattgtctatatggaatttaggataaagaatatttacaataaagaatatttacaataaagagtttattattatttgtaagttgtgtgcaacaaacataccctttatctctgtaaaatttata

SEQ ID NO: 2955 - DNA, 304 bp, Homo sapiens
  source 1..304: mol_type = other DNA
gctgggcgcaatggctcacacccgcccataatcccagcactttgggaagtcaaggtgggcggattgcttgagtccaggagttcgagaccagcctgggcaacatggaagaaacccctgtctctactaaaaatacaaaaaattagccaggtgtggtggtgtgcacctgtagtcccagctactcgggaggctgaggtgggaaaatggcttgagcctaggagatggaggctgcagtgagctgtgatcgtgccaccacactccagcttaggcgacagagccagaccgtcttaaaaaacaaaacaaaaaa

SEQ ID NO: 2956 - DNA, 299 bp, Homo sapiens
  source 1..299: mol_type = other DNA
ctgggcgcggtggctcacgcctgtaatcccagcactttgggaggccgaggcgggcggatcaggaggtcaggagattgagaccttcctggctaacactgcgaaaccccgtctctactaaaaattagccaggcatggtggcaggcgcctgtagtcccagctacttgggaggctgaggcaggagaatggtgtgaacccaggaggtagagcttgcagtgagccaagatcgcgccactgcactccagcctgggcgatagagcgagactccatctcaaaaaaaaaaaaaaaaaaaaaaagaaaga

SEQ ID NO: 2957 - DNA, 112 bp, Homo sapiens
  source 1..112: mol_type = other DNA
gctaggcgcggtggctcacacctgtaatcccaggaggccaagatggctggatcacttgagcccaggagtgaccagcctgggcaacatggcaaaactccatcactacaaaaaa

SEQ ID NO: 2958 - DNA, 433 bp, Homo sapiens
  source 1..433: mol_type = other DNA
cccaaatccattctcctgtcttccacagtagcaggtttcagctatgcacatgactgggtaatataaatataaaaactatacttcccagcctcctctgtggctcagtgtggttacataacaagactctggccaatacagtattagctgaagggataaatgtgatttctgggttacgcccttaaaggaaagggcgtgccctccttcctcttttttcccatccaggagccatcttggatgactcagatgagggtaccatcctgagaatggagagtgataagacagaaaaagcctgggttcctggtatgatggggccagcataccagccatggactgcttatccctgtgctgttacaagaggaagaaatcatctatcttgttaaagtcattgttactttgggtttggttacagcagcctctacatcctaatcaatac

SEQ ID NO: 2959 - DNA, 400 bp, Homo sapiens
  source 1..400: mol_type = other DNA
cagcctctctacccagctttcctcccctgattccattagacacactggccttctctctccctccaacagccacacctgcctatctccaggccttggaacttgctgttgccacctctcaagatgcttttcttcagctcttctgtgaccatccccttcccatccttcaggtgcagctcagggagacccccccttcatcctacaccatccccttataactttctactcctcccttccagcctgaaatcattttagctacctattggtttgctatctccacccagcctcaggctgtgagttaccccagagcagggctatagctatctcattctctgctttatccttagctctacagcatctggcacataacagttgctcaattaatactggctgaataaacaaa

SEQ ID NO: 2960 - DNA, 325 bp, Homo sapiens
  source 1..325: mol_type = other DNA
ggccgggagtggtggctcatgcctgcaatcccaacaatttgggaagtcgaggtgggaagattgcttgagtccagggcttcaagaccagctggggcaacatagcaagacctcatctctaataaaaataaaaaaataaaacaattagcctagcctagttgcgcatgcctgtagacccagcttcccagctactcggaggcttaggtaggagaatctcttaaccccaggagttcgaggctgccctgagccgtgatcgtgccactgcactccagcccatgggacagtgcgaaaccctgtctcaaaccaacaaaccagacaaaaaaagaga

SEQ ID NO: 2961 - DNA, 310 bp, Homo sapiens
  source 1..310: mol_type = other DNA
ggccgggcgtggtggctcacacctgtaatcccagcacttggggaggccgaggcgggtggatcacgaggtcaggagatcaagaccttcctggctaacacagtgaaaccccatctctactaaaaatacaaaaaagtagccaggcatggtggctggcgcctgtagtcccagctactcgggaggctgaggcaggagaatggcgtgaacccagaaggcagagcttgcaatgagccaagatcgcgccactgcactccagcctgggcgacagagcgagactccgtctccaaaaaaaaaaaaaaaaaaaaaaaaaaaa

SEQ ID NO: 2962 - DNA, 182 bp, Homo sapiens
  source 1..182: mol_type = other DNA
agtggttcttaacccagactacacattagaatcacctggagagctgttaaaatttgtattcaacgacctgagcaccaccagacatcgatttgatcagaatgtttggggttgggacttaggcatcagtattttgtaaaagctcaccagatgcttccaatgtgtggccagagatgagaaccact

SEQ ID NO: 2963 - DNA, 458 bp, Homo sapiens
  source 1..458: mol_type = other DNA
tgtagattgaatcgtccctcctgaccctaccaaaaaaatatattcaagtcctaactctagatcctatgaatgggaccttatttggaaatagtgtctttgcagatgtaatcaagttcagatgaagtcatactagacttaaaggggtccaggctaatgacagctgtccccgtgagaagaggaatcaacgcacatgcactcgggaagaaggtcacatgaagacagaggcagagatgggagtgacacagccacaggccacagagggccaagggtctccaggagccactggaagctgggagagacaaagaagggtttcctcctagagccttcagggagagcatggccctgtgacaccttgattcaaacttccggcctctagaactatgagagaataaatatgtattgtttaaagccattcaatttgtggtcatttgttatagcagccactggaaactactaca

SEQ ID NO: 2964 - DNA, 240 bp, Homo sapiens
  source 1..240: mol_type = other DNA
ccacccactcaccagacacacacacaccccaagtcgttcgcaactccattctccttttaaccgtaacaatggcctttagacttcctttggtccctggtccttgacggcatctgaagtcatcctggctatttcctggcaagcctcatgaggccatgctctgtatctgcctcattcaccgctgaatccccagcatcttggaaagtacccggcacgtgatagatccccaaacatcttggtgaa

SEQ ID NO: 2965 - DNA, 138 bp, Homo sapiens
  source 1..138: mol_type = other DNA
ctctaaaaggagggtcctactctataccaagctctcagggttttgtgggtgtgtgtgagaatccaatgtgataatatctgtaaagtggctggccttagggtacacatccagtagggaaaagatgatcgccctattatt

SEQ ID NO: 2966 - DNA, 192 bp, Homo sapiens
  source 1..192: mol_type = other DNA
agttcaaattaaggctctaccactttcttcctggataacacttggcccattgccacacatctctgtgcccaacccctcctccaggaaggagaccatgattgcagtacttatcatctacagtgttataacaattaaaagacttaatgcttgcagagcacttagccccttgtcctactccagtcaatgataaat

SEQ ID NO: 2967 - DNA, 101 bp, Homo sapiens
  source 1..101: mol_type = other DNA
gggcaggaattgagcactcactgtgtgccagtcactgtgctccttatctgctatgtgaccttgggcaaagccgggtctcactatcctcaactgtcagacaa

SEQ ID NO: 2968 - DNA, 136 bp, Homo sapiens
  source 1..136: mol_type = other DNA
agcctcaattttctcatttgcaaaaaggaataatgatagtatcaacttcatcggattgtcaagagcatcgtatgaaatgatgcatgtaaaatgctcagttctgtgcttaacatgcagtaaacacacaccaaatagt

SEQ ID NO: 2969 - DNA, 212 bp, Homo sapiens
  source 1..212: mol_type = other DNA
ctgcttccattagaatttctgcttggccacatcacaactgtgtgatcttgggcaagtgacttaacttctctgtgccacacttttctcatctgtaaaatggagccaataattatgtctctcttccagggttgttatgagattcaatgaggtaaaacagataaggcaccgaaaatggtgtcttggtcatagtcaatgctccataaatattagct

SEQ ID NO: 2970 - DNA, 291 bp, Homo sapiens
  source 1..291: mol_type = other DNA
gccaggtgcggtggctcacgcctgtaatcccagcactttgggaggttgaggcaggcgtgtcacttgaggccaggagttcgagaccagcctggccaacatgatgaaaccccgtctctactacaaatacaaaaattagccgggtgtggtggcacacgcctgtagtcccagctactggggaggctgaggcagcattgcttgaacccaggaggtggaggttgcagtgagccaagatcacaccactgcactccagcctgggcgacagagggagacactgtctccaaaagaaagaaa

SEQ ID NO: 2971 - DNA, 287 bp, Homo sapiens
  source 1..287: mol_type = other DNA
ctcacgcctgtaatcccagcactttgggaggccgaggcgggcggatcgtgaggtcaggagttcgagaccagcctgatcaacacggtgaaaccctgtctctactaaaaatacaaaaaatattagccgggtgtgggggcgggcgcctgtaatcctagctattcaggtggctgaggcaggagaattgcttgaacctgggaggcggaggttgcagtgagccgagatcgcgcccttacactccagcctgggtgacagagcgagactccgtctcaaaaaaaaaaagaaaaaaa

SEQ ID NO: 2972 - DNA, 294 bp, Homo sapiens
  source 1..294: mol_type = other DNA
gggttggggatgaacagaagttgattagtgggcacagaaatacagttagatagaaggaatagttccagcattcgatattacagtagggagactgcatttaacaataattgattgtatatttgaaaacagctagaagaataagaatattcccaacacaaagaaaagataagcgaggtgaaggaaatcccagttaccctcattcagtccattacacattcgatacaggtatcaaaatatcataggcacctcaaagacatgtacaactcttaatttaacatttttgaaagaaaaaaa

SEQ ID NO: 2973 - DNA, 302 bp, Homo sapiens
  source 1..302: mol_type = other DNA
ggaaagttgactgaggtgaccagtaatagaattgaaaagggagagtgtcttcagtgcaatgtggcatcctggattgggtcttggaacaaaaacaggacattagtgggaaaattggaaatctgaaaaaagtctgaattttagttaatataccaatttcagtctcttggttttgacagatgtaccatggtgatgtaagatgttgaccttggggtaggctgggtgaagggtatacaggaactctttgtactatctctgcaacttctctgtaaatctagtatcattccaaaataaaagtttattta

SEQ ID NO: 2974 - DNA, 256 bp, Homo sapiens
  source 1..256: mol_type = other DNA
tcctcttcctccacccctccttccttgaacgcagacatgattcttggggatacagcagccatcttgggaccatgaagtaacgagcactgagattaaggcaaaaggatccaagacgtgacccctaccttcgtggagttgttgaaccaataccattagccacccatctccagaatccatgctatgtggaaaaacaatcttctgtttgtttaaaccactgcaatcaaggttttcctttccttgcagctgaatgtagtcc

SEQ ID NO: 2975 - DNA, 215 bp, Homo sapiens
  source 1..215: mol_type = other DNA
catggtgaaaccctgtctccactaaaaatacaaaaaattagctgggcatggtggtgggcgcctgtagtcccagctactcaggaggctgaagcagaagaatggcgtgaacctgggaggcggagcttgtggtgagccgagattgcgccactgcactccagcctgggcgacagagtgagactccatctcaaaaaaaaaaaaaaaaaaaaaaaaaaaaa

SEQ ID NO: 2976 - DNA, 84 bp, Homo sapiens
  source 1..84: mol_type = other DNA
tgtagtcatttgtttgcctgtatcttgagctcccctaaaagagagaacatgttctattcaacattgtagttgtagtacaaggca

SEQ ID NO: 2977 - DNA, 619 bp, Homo sapiens
  source 1..619: mol_type = other DNA
atagatatttctccaaagaaaatatccaaattaccaacaggtacatgaaaaaaatgctcagcatcactaatcatcagggaaatgcaaatcaaaaccacaaagagatattgcctcaagcctgttagaatggtctgattaaaagaaaaagataacgagtgttaacaatggggagaaattggaacacttgtacagtgtttctgggaaagtaaaactgtgcagcctctatggaaaacagtacagttgttcctcaaaaaaattaagaaagtagaactaccatatgatctagcaatctcacttcaggttatttatctgaaagaattgagattgggatgattctcaggctcattgcagcattatttacactaatcaaaatgtggaaataaggttaatgtttattggcagatgaatagataaagaaaatgtggtatattcatacaacggaatattattcagctttaaaacaagaaaatccggcaatatgcaacatggatgaacctagaggacattaatgctacgtaaagtaaatcagtcacagaaggacaaactgtatgattccacttgtataaagtatctaagatagccaaattaattagaatcacagattagaatggtgatagcc

SEQ ID NO: 2978 - DNA, 1386 bp, Homo sapiens
  source 1..1386: mol_type = other DNA
cactcttcaaaggaaaataaaagagcctatctctacaaaatatcatacacataatctaacatataatttaacctgcctagacatagaaccaggaaaatatgacacataacaaaaaaagtaaacaatggattaagacattgaaatggcccacatgctggaattagaagatgagaaatttaaaataagctattataagcatattcaaggatttaaggaatagatggtcataagagagaatatatggagaatctcaacagagaagtaaaaatgataaagggataataggacaaattttagaactgagagacagaatatcttatataaaagtgtcattttatgcacataccagtaaattaaagatggcagaaaaaactatcagtgcacttaaaaacagatcaagaacaatttcccaatacagctaatacaaaggagaaaaataataaaaatatgaccagtctagcactaatataattggactcctagaaagagtagagaagaaaatgagacagaaaaagctatttgaaaaagtaaagaccaaaagttttcctaattgtcagcatatatcaacttacaggtttaagaaactcaaagaacagaataaaaatatacagaaccaaatgtagacataccatagtcaaaacactgggcaaaaaaagagtaaatcttgaaagtagctaaagggagggagaaaataatttacatacgtggaaacaaataggtcatctacctgtcatcagaaatgacactttaaaaagcaatgaaactacatcttcaaaataaaaaaaaaactgtcagctccaaattctataactagaaaaagtaattcttgagaaaataaagatttattcagataaaagaaagcttcgaacaattgtcattagcagacctagatacaagaaatgcaaacggaaattttttagactaaagaaagataacaacagatggaaattctgacctacaggaagtaaggagaagctctaggaatggcatgtgcataaacaggaaaaactaaggcttttttcttttagttttataacaaacaactgatggtttaaataaaaaattaagagtactattgataacgtatgtagagtaaaatattctaaattaatagctctgacaggagactaaacgcaacaattttgccacaacttttctttatgttccatgaaaacgttgactattaacagtaagtggactgcgataagcccaggatgtttattacaatccctagagaaccaccacattatatgaagatattcttctaaaatgccaataaaggaattaaaatggaacgctgaatattgttcagttaatataaaaaggcatgaaagaaagaacagaggagcaaaaaatgatggaacaaatagaagataagagcaaaat

SEQ ID NO: 2979 - DNA, 6130 bp, Homo sapiens
  source 1..6130: mol_type = other DNA
gagggtggagccaagatggccgaataggaacagccccagtctacagctcccagcgtgagtgatgcagaagacgggtgatttctgcatttccaactgaggtaccaggttcatctcactggggagtgctggacagtgggtgcagcgcaccatgcatgagccatagcagggcaaggcatcacctcacctgggaagcacaatgggtcagggaattccctttcctagtcaaagaaaggggtgacagatggcacctggaaaatcaggtcactcccaccctaatattgcgcttttccaacaggcttatcaaatggcacaccaggagattatatccagcacctggcttggagggtcctacacccccggagccttgctgtttgctagcacagcagtctgagatcaaactgcaaggtaacagttgggctgggggaggggcgcccgccattgctcgggcttgagtaagtaaacaaagcagccaggaagttcgaactgggtggagcccaccacagctcaaggaggacagcctgcctctgtaggctccacctcggggggcagggcacagaccaacaaaagacagcaataacctctgcagacttaaatgtccctgtctgacagctttgaagagaatagtggttctcccagcacgcagcttgagatctgagaacgggcagacaacccccacctagtgggtccctgaaccccgagtagcctaacagggaggcaccccccagtaggcacagactgacacctcacatggccgggtacccctctgagacaaaacctccagaggaacgatcaggcagcagcatttgcagttcaccaatatccactgttctgcagccaccactgctgataccccccaggcaaatagtgtctggaggagacctccagtaaactccaacagacctgcagctgaggatcctgactgttagaaggaaaactaacaaacagaaaggacatccacaccaaaaccccatctgtatgtcaccatcatcaaggaccaaaggtagataaaaccacaaagatggggaaaaaaagagcagaaaaactggaaactctaaaaatcagagtgcctatcctcctccaaaggaatgcaactcctcatcagcaatggaacaaagctggacggagaatgactttgacgagttgagagaggaagacttcagaagatcaaagtactccgagctaaaggaggaagttcgaaccaatggcaaagaagttaaaaactttgaaaaaaaaattagacgaatggataactagaataaccaatgtggagaagtccttaaaggacctgatggagctgaaaaccatggcacgagaactacacgacaaatgcataagcctcagtaaccgatgtgatcaacgggaagaaagggtatcagcgatggaagatgaaatgaatgaaatgaagcatgaagagaagtttagagaaaaaagaataaaaagaaatgaacaaagcctccaagaaatatgggactatgtcaatagaacaaatctacgtctatttggtttacctgaatgtgacggggagaatggaaccaagttggaaaacactctgcaggatattatccaggagaacttccccaatctagcaaggcaggccaacattcacattcaggaaatacagagaatgccacaaagatactcctcgagaagagcaattccaagacacataattgtcagattcaccaaagttgaaatgaaagaaaagattttaaaggcagccagagagaaaggtcgggttacccacaaaaggaagcccatcagactaactgctgatctctctgcagaaactctacaagccagaagagagtaggggccaatattcaacattcttaaaggaaagaattttcaacccagaatttcatatccagccaaactaaccttcataagtgagggagaaataatatgctccacagacaagcaaatgctgagagattttgtcaccaccaggcctgccctaaaagatctcctgaaggaagcactaaacatggaaaggaacaactggtaccagccactgtaaaaccatgccaaattgtaaagaccatcaaggctaggaagaaactgcataaactaacgaggaaaataaccagctaacgtcataatgacaggatcaagttcacacataacaatactaaccttaaatgtaaatgggttaaatgctccaattaaaaggtgcagactggcaaattggataaagagtcaagacccatcagtgtgctgtatccaggaaacccatctcacgtgcagagacacacataggctcaaaataaagggatggaggaagatctaccaagcaaatggaaaacaaaaaaaggcaggggttgcaatcctagtctcggataaaacagactttaaaccaacaaagatcaaaagagacaaagaaggccattacataatggtaaagggatcaattcaacaagaactaactatcctaaatatatatgcacacaatacagaagcacccagattcataaagcaagtccttagtgacctacaaagtgatttagactcccacacaataataatgggagactttaacaccccactgtcaacattagacagatcaacgagacagaaagttaacaaggatatacaggaattgaactcagctctgcactaagcagacctaatagacatctacagaactctgtaccccaaatcaacagaatatgtattcttttcagcaccacaccacacctattccaaaattgagcacatagttggaagtaaagcactccttagcaaatgtaaaagaacagaaagtataacaaactgtctctcggaacacagtgcaatcaaactacaactcaggatttaaaaactcactcaagaccactcaactacatggaaactgaacaacctgctcctgaatgactactgggtacataaggaaatgaaggcagaaataaagatgttatttgaaaccaacaagaacaaagacacaacataccagtatctctgggacacattcaaagcagtgtgtggagggaaatttatagcactaaatgcccacaagagaaagcatgaaagaactaaaattgacatcctaacatcacaattaaaagaactagagaagcaagaacaaacacattcaaaagataacagaaggcaagaagtaacttagatcagagcagaactgaaggaaatagagacacaaaaaacccttcaaaaaatcaatgaatccaggagctggttttttgaaaagatcaacaaaattgatagaccactagcaagactaataaagaagaaaagagagaagaatcaaatagatgcaataaaaattgacaaaggggatatcaccaccaatcccacagaaatacacactaccatcagagaatactataaacacctctacacaaataaactagaaaatctagaagaaatggataaattcctcgacacatacatcctcccaagactaaaccaggaagtagaatctctgaatagaccaataacaggctctgaaattgaggcaataattaatagcttaccaaccaaaaaaagtccaggaccagatggattcacagccaaattctaccagtggcacaaggaggagctggtaccattccttctgaaacttttccaatcaatagaaaaagagggaatcctccctaactcattttatgaggccagtatcatcctgataccaaagcctggcagagacaaaaaaaaaaagagaattttagaccaatatccttgatgaacagtgatgcaaaaatcctcaataaaatactggcaaacagaatcctacaacacatcaaaaagcttatccaccatgatcaagcgggtttcatccctgggatgaaaggctggttcaacatatgaaaatcagtaaacgtaatccagcatataaacaggaccaaagacaaaaaccacatgattatctcaatagatgcacaaaaggcctttgacaaaattcagcaaatcttcatgctaaaaactgtcaataaattagggattgataggacgtatctcaaaataataagagctatctatgacaaacccacagccaatatcatactgaatggcaaaaactggaagcattccctttgaaaactggcacaaaacagggatgccctctctcaccactcctattcaacatagtgttggaagttctggccagggcaatcaggaaggagaaggaaataaagggcattcaattaggaaaagaggaagtcaaattgtccctgttttcagatgacatgattgtgaatgtggaaaaccccatcgtctcagcccaaaatctcgttaagctgataagcaacttcagcaaagtctcaggatacaaaatcaatgtgcaaaaatcacaagcattcttataccccaataacagacaaacagagagccaaatcatgagtgaactcccattaacaattgcttcaaagagaataaaatacctaggaataccacttacaagggatgtgaaggacctcttcaaggagaactgcaaatcactgctcaatgaaataaaaaaggatacaaacaaatggaagaacattccatgctcatgggtaggaagaatcaatatcgtgaaaatggccatactgcccaaggtaatttaaagattcaatgccatctccatcaaactaccaaagactttcttaacagaattggaaaaaaattactttaaagttcatatggaaccaaaaaagagcctgcattgccaagtcaatcctaaggcaaaagaacaaagctggaggcatcatgctacctgacttcaaactatactacaaggctacagtaaccaaaacagcatggtattagtaccaaaacagagatatagaccaatggaacaggacagagccctcagaaataatgccgcatatctacaactatctgatctttgacaaacctgacaaaaacaagaaatagggaaaggattccctatttaataaatggtactgggaaaactggctagccatatgtagaaagttgaaactggatcccttccttacaccttatacaaaaattaattcaagatggattaaagacttacatgttagacctaaaaccataaaaaccctagaagaaaacctaggcaataccattcaggacataggcatgggcaaggactccatgtctaaaacaccaaaagcaatggcaacaaaagacaaaattgacaaatgggatctaattaaactaaggagcttctgcacagcaaaagaaactaccatcagagtgaatagacatcctacagtatgggagaaaagttttgcaacctactcatctgacaaatggctaatatccagaatctacaatgaactcaaacaaattcacaagaagaaaacaaacaaccccatcaaaatgtgggcaaaggaaatgaacagacacttctcaaaagaagacatttatgcagccaaaagacacatgaaaaaatgctcatcatcactggccatcagagaaatgcaaatcaaaaccacaatgagataccatctcacaccagttagaatggcgatcataaaaaagtcaggaaacaacaggtgctggagaggatgtggagaaataggaacattttatactgttgatgggactgtaaactagttcaaccattgtggaagtcagtgtggtgattcctcagggatctagaactagaaataccatttgacccagccatcccattactgggtatatacccaaaggattataaatcatgctgctctaaagacacatgcacacgtatgtttattgtggcagtattcacaatagcaaagacttggaaccaacccaaatgtccaacaatgatagactggattaagaaaatgtgacacatatacaccatggaataccatgcagccataaaaaatgatgagttcatgtcctttgtagggacatggatgaagctggaaaccatcattctcagcaaactatcacaaggacaaaaaatcaaacaccacatgttctcactcataggtgggaattgaacaatgaggaaacatggatacaggaaggggaacatcacacaccggggactgttgtggggtgggtggagggggtagggatagcattaggagatatacctaatgttaaatgaggagttaatgggtgcagcacaccaacatggcacatgtgtacatatgtagcaaacctgcacgttgtgcacatgtaccctaaaacttaaagtataataaaaaaa

SEQ ID NO: 2980 - DNA, 209 bp, Homo sapiens
  source 1..209: mol_type = other DNA
tcttttaggcacagctcatgtctcatgactttcaaaaagtttttcttctgatattcccagctcgaattaggtacatcccaatcagtttccttagacttacaactctgcatattattggcttacaatctgtcttaggctgggaattagctccttgtaggcaggggctagaatttatttactcttatgtccataatgcctgacacaggaac

SEQ ID NO: 2981 - DNA, 398 bp, Homo sapiens
  source 1..398: mol_type = other DNA
ctgtggtctgacactacatgccgcctcagtgactaaagcataatttcccgtctcctgggagtgttgacagctgactcctggcaacaatactcacagcacagtaaagttccttcatccaagttcatgtcccttctcaaggcatcccacatccgagaactgcttggtacagaaatataatggcctggttttcttgctccaattcgaggtctttaggtaaactcaccaagatcttgtagagtggactgcggccatgatagtgattgcattccagccgacttcctgctccacccaatcctattgctttcactcttccacaggtgttgggaatatcatttcaacctccttgcatgcaaatctccaactcggagtcggcttcctaggacacctgactggtgata

SEQ ID NO: 2982 - DNA, 316 bp, Homo sapiens
  source 1..316: mol_type = other DNA
gccaggcacagtggctcacacctgtagtcccagcacttgaggaggccgaggtgggaggatcatctgaggtcaggagttggagaccagcctggccaacatggtgaaaccctgtctttactaaaaatagaaaaaaaatatataaaagctagctgagtgtcatggcgggtgcctgtaatcccagctactctggaggctgaggcaggagaatcacttgaatctgggaggcggaggttgcagtgagctgagattgcaccactgcactccagcctgggtgacagaatgagtccatctcaaaaaaaaaagaaaaaagaaaaaa

SEQ ID NO: 2983 - DNA, 1441 bp, Homo sapiens
  source 1..1441: mol_type = other DNA
gcatcacctgccctgtcacctcatcaccgcattactgaagctatactaacaacagtcacttttagtgggtacttcatgcatcagaataaagggaaaaaattgcaaggcttactaaaatccaaaaaaagaaaaaaatacaatttgtgtcaacagagcaagcttcagaagcagacaaagatatgatcttggaatttttttttaaacctctggagaatatgctaagggcctaatgaatgaagtagacagtattcaagtgtagatgggtaatgtaatgagaaagacagacatcgtaagaactttcaacataatgtagtgatgaaaaacgtggtaaataactgaagaatacctctgatggcttattagtagactggactcagctgagtaaaaatctctgagcttgaggatttatcatcagaaacttcgaaaactaaagaaaagaaacactgaaaagaacagaagatgatattcaagactgtgggacaactacaaaaggtgaaacagtaatgagaataccaagaggagaagaaatagaagaaagttctgcaacaaccatgtctgagaacttccagtattaatgtcagacaccaaaccaaagatccaggaagctctgagaacaccaggcagaataaataccaacaacctacacttggacatataattttcaaactatatgaaataaaagataaaggaaaactctgaaagaaaccagaggtggggcagaaaacaccttacctacagagacacaaagataagaactgcattcaacatttcagaaactgtgaaagtaagaagacagtgaaatgaaaaattcaaaatgttgacagaaaaaacccaccaacctaagtttctgtacccactgaaaccacccttcaaaagtgaaggagaattaaggccttcctcagaaaaataaaaattcaagaaacttgttgccaggagacctgtcttgcaagaaatgttaaatgaaattctttagggaaacaaaagatatataactgaaacctggatcaacatttttttaaaaagagcattaaagaaagaattgtggtacaataaaaacctatgtatttattcttaattgatctgaccaagaagatcatagacaataacaaatacagatatattatgtatgcttatatacaattgaaatgagtaacactaatacaaggaatggaatggaaggatggtagggaggcattgtggtacaataaaaacatgtatttattcataattgatctgaccaataagtttgtagataataataaatacacacagatagattatgcatgcttatacacaagtgaaataaggaacaataatacaaggaatggaatggaaggatgggagggaggaatcaggtgttttctttgttaagcaggtagtcacccgtgaagtgggatagtgttatctgaaagtggacttgaattggttgtaaatgtatatt

SEQ ID NO: 2984 - DNA, 1416 bp, Homo sapiens
  source 1..1416: mol_type = other DNA
tcactcacataggattccagaacactgctacaaggctctgagtgtttgtccctcacataggattccagaacactgctgccattgtctgaatgtttgtcctccacataggattccagaagtctgctgctggggtctgaatgtttgtcccccatctaggattccagaacactgctgtgagggtctgaatgtatgtccctcacatatgattctagaatattgatgctagggtctgtatgtttgcccttaacatatgatttcaaaacactgctcctggattctgaatgtttgtccttctcataggaatacagaacactgctgctggagtctgaatgtttgtcactcacatagaattccagaacactgctgcgaggatctgaatgtttgaccctcacatgggattccagaacactgctgcgagggtctaaatgcctgtccctcacataggtttccagcacaatgttacgaggttctgaatgtttgtccctaacataggattccagagcactcctgctgtgctctgaatgcttctccctcacataggattccagaacactgctatgagggtctgaatgcttatacctcatataggattccagaacactcctgctgtggtctgaatgtttgttcctcacataggattccagaacactcctgccgtggtctgaatgtttgtcactcacataggattccagaacattcatgctggggtctcaatgtttcccttaacataggatttcagaacactgctcttggggtctgcatgtttgtccctcacataggattacagaacactgctgctggagtctgaatgtttgtcagtcacatagaattccagaacactgctacaagggtgtgaatatttttccctcacctagtattccagaacactgttgcaagggtctgcacgttggtccgtcatataggattccagaacactgctgctgtggtctgaatgtttgtccctcacataaaattctggaacactgctacaagggtctgaatgtttgtccttcacataccattccagaacactgctgccgtggtctgaatgtatgtccctcacataggattccagaacactgctactaggttctgaatgtttttcccacacctaggattccagaacacttctgctggtgtctgaatggttgtccctcacatatgattccaggacactgctatgagagtcttaatgtttgtccttcacatagaattccagaacactgctcccgtggtctgaatgtttgtccctcacataggattccacaacactactgctggggtctgaatgtttggccctcacataggattctagaacactccagctggcttctgagtgtttgtccctcacataggattcctgaagactgctgctgtcgctatagtcgttgagagtgtctgaatgtttgaccttca

SEQ ID NO: 2985 - DNA, 2021 bp, Homo sapiens
  source 1..2021: mol_type = other DNA
ctttgctatattgcacttcacatactgcctttttcacaaattgaaggtttgtggcaagcctgcattgaggaagtctactagagccactttgtttacagcatgtgctcactccatgtctccatgtcacattttggtgattctcacaatattgcaagctttttcactattattatatctgttatggtgatctgtattcagtgatctttgatgttgctactgtaatatggggagaaaccacaaaccatacctttaagagatagcaacttaatcaatacatattgtgtgtcctctgactactccactgagcagaatttccctgtctctctccctctcttagtgactccaatttgtgagacacaacaatagtgaaattaggccagttaataaccttataatgggctctaagtgttcaagtgtaagaaagagtttcatgtgtgttactttaaatcaaaagctggaaatacttaagcctagcaaggaagacatgtcaaaagccaacttagatctaaagctagaactcttgtttttaacagttagccaagttgtgaatgcaaagaaaaaattcttgaaggaaatcaaaacttctactccagtgaacacaggaatagtaagaaagagaaacagccttattgctgagacttggaatgttttagtggttcggccagaaagtcaaatcagccacaacattatcttcagccaaaacgcaatctagaccaaagctctaatgctcttcaattctgtgaaggctgagagaggtaagagaaaactgcagaagaaaagttggaagctgacaaaggttggttcttaaggtggaaggaaaggagccatcttaacaacataaaagtggaaagtgaaacagtaactgctgatgaaaaagcttcagaaaattattcagaaaatttagctaaaataattgatgaatgtgactaccctaaacaacagattttcaatgtagacagaacagttttatattgaaagaagatttcatctaagcctttcatagctagaggggagaagtcaatgtctggcttcaaagcttcaaatgacagactgacactcttgttaggggttagtgcagctagtcagttgaaaccaatgcttatttaccatttgaaaatcctaaggctaataagaattatgccagatctactctacttgtctctataaatgaagcaacaaagcctttatgacagaacacctgtttatagcatggtttactgaatactttaagcccactgttgagacgtactaatccaaatataagattctctttcaaatattactgcttgtggacaatgtacgtggtcacccaagagctctgatgaacatatacaaggacattaatgttgtttcatgcaacctaacacaacaccaattctgtagctcatggatcaagaagcaattttgactttcaggtcttataacttaatatatacattttgtaagattgtagctgtcatagatagtgattcctctgatggatctgaaaaatcttctggagaggatccaccattctagatactattaggaacatttgtgattcatggaagaaggccaaagtatcaacattagtaagagtttagaacaagttgcttccaaccttcatggatgactttgaggggttcaagacttcagaggagaaagtaattgcagatgtaatggaaatagcaagagaactaggattaaaagtggagcctaaagatgtcactgaattgctgcaatcttgtaatataaccaacagatgaggagttgtttcttatagatgaacaaagaaagtggtttcttgagatggaatctattcctggtgaagatactgtgaacattattgaaataacaatgaggatttagaatagtccctaaatgtaattgatagagcaatggcagggtttgaaaggattgcctctaattttgaatgaagttctactgtggataagtactatcaaatgatatcctatgctacagagaagtctttcatgaaagagtcattcaatgcagcatacttcattgctgtcttatgaaac

SEQ ID NO: 2986 - DNA, 603 bp, Homo sapiens
  source 1..603: mol_type = other DNA
atttttattgcacactatgtatgatagccaagatacagaataagcctaagtgtctggcaacagatgaatgcataaagaaaatgcactatctgtatacaatgaagtactctgtagccataaaaaataaaatcttgccatttatgacaatatggatgaatctagaggacatcgtggtaagtgaaataagccagacacagaaagacaagtacagcatgatctctctcataagtggagtctaaaaaaaaaagaaaatacaaacatttaaaaaagttaatagcatagaagcagagagtagaaaaatgttaccagagactaaagaaggatgaggaaactttgattgatggtataaaattacaactagataagagcaataaattctggtgttctgttgcatgtagagcaagtatggttaacagtgaaatatcgtatattacaaaatagcttgaagagttgtcttcgaatgttctcaccacaaagaagtgataaatatgtaagataatagattcactctgaatggatcattatacaacatggataggtatccaggtatcaaattgtaccccatgaatatgtacaattattacatgtcaattaataaataaa

SEQ ID NO: 2987 - DNA, 1254 bp, Homo sapiens
  source 1..1254: mol_type = other DNA
gccaccgttgctgggggttgggtccctgagacttggcgaagtaggagtactggactcgcgcacaggccctgtctcgcaggttttcaggtgcgcttggcgtttcctccgctttgaggggcaggtctccagtggcccccgggcgcaggcctggacatcactgtccgtctcgtcgtcgcccactacggcctcagagacacgggctcactgcatgtgctcttgggggacatcagggccacgtgtggtcacactggctccggctcggactaccctctgtctctctttgcccgtgtcgccggaagccgcgtcgagatgccggagcccccgggccttggagatgaaggcaggcccctgctccacccaggaaggagggaggcagtgggctcgtgggtcagtgcctttgcagccgacagcacgccttgcggccctggggaatctttctgcgccctggcgagcgcctttccgcctcactgcattgtaaccccattcccgatcaccgggtgggatccatcatcggatcccaagaggagtccgcgcagcccagccggcaccccgaagctcctccttcaccgggaacccaagcagaagaccgattaaggaggtcctgacgacaggactcctatgggtccgaccctgggtctcccgcaggcccctctggtagtcctcttcccacccaccgcctggggctgcaccacagccgccgccgcaagctccagcaccgccaccccagtccccgcagccgcggcgtcgccgccattttttaaagggtccgcagcctgactgccgagtaagggggggtggggcgggtgagtcggcctcgccagcgcgcatgcgcgaggcccgagccgccgcttcggtcacagtgaccgccaccgttgccaagggatgggtccctgagacttggcgaagtgggagccctgtgtgatcgtgcgtcagagtcggggctgagaccagccccggccagggtagttaccgggacggtctccggaggccgggattcgcggagggtccaccagcaggaagaaaccccaggaggaagaaacctcagacagatcgccggggaggcagcgcgggatcccagcctcaggcgtgcgcggacggtgtgcgggtgagtctccccaaaagtggcggccttgtgatgtcgaggacaggtctcgctgtgtgcccgtgggctgctgtctcaccggtggctcgtagtcgcggagagcagaacccggcagcttcaggggctgcctgggggtgggtgttacctgctgt

SEQ ID NO: 2988 - DNA, 1174 bp, Homo sapiens
  source 1..1174: mol_type = other DNA
aagacaaaaatgcatgcagacttccacttccaggcaaaatgcagaaaatgtacttttccctgttctttccactaaatacagctttaaaaacccttggccgtgatacataagacaaacaaaggaagacaacaaaatgtagagagagggcagaccaattagggcttcaggtgccaagaaacacaagaggatgaattccctaggtttcctttctgactcatatatacaagaaaagttgctagagaagcagacaactcagaaacaccaacaggcacacacatacataaaactccaagaaaattctgctgtctcttgtcaaaaaagcagggaagcggcaggctaccaagaaaaaaaaactcacagacaacaaccaaccagtttaagccaaagggtacaaataaaaccccaagccatataccttttgcaaagacttaaaaggaggacatagtcagccattccccactcctacccacagacaacatgataccacagcaggccaagtggggacacaggacactcatacccactgagcagtaacgcggcttcctccctctagagtgtgggtggaaaaaaagtggggagcctgagttcaacacccacccaatgataaggacatatccctatccctccctctacagagatatgacagcagaggcctactggagaatccaaactcaaagcactgctcagtgataacttaaccacccctccatcccagtgtcagtggaggccaagtgaaaagcaggaaccttttgagccagggtggtattcacaaaggtataatgcaagtccagagttttcattcctactcagcatttactaggtgtacgtctccatcagtgagtcaacaaaggcctactatgaaactggaatcttcacatacacctgggagtagtaacaaggctgtgccccacctccaccccaaaagcaaagtttcagataaatcctactaaaaggggggatttaaataaaatgcagagcttcataacacaacacttaaaatgcaaaggattcaaccaaatataccatgtcataccatactaagaaccaggaaaatctgaacaggaatttgaaaatatagtcaaaaggtgcaaacaatgagaattcatagaggtcataattatctatcaaagattttaaactatatattataaaactgcgtcaacaagcaattaca

SEQ ID NO: 2989 - DNA, 336 bp, Homo sapiens
  source 1..336: mol_type = other DNA
cccagaaatgtatatgttgaaatcctaacctccaatgtgctgatatgaggagttggggcctttggggggtaattagatcatgaaagtggagctctcgtcagtgggattagtgctcttatgaaagataccccagagagccctccagtcctctttctgccatgtgagaatacaatgagcagatggcagtctgcaacctggaagaggaccctcaccagaatccaaccatgctggtaccctgatcttgcacttccctgattccagaactgtgagaaataactttatgttgtttataagccaccctgtctatggtacttggtttcatcaggacaaactaga

SEQ ID NO: 2990 - DNA, 299 bp, Homo sapiens
  source 1..299: mol_type = other DNA
gctgagtgcagtggctcacgcctgtaatcccagcactctgggaggcctaggtgggcagatagcttgagctcaggagttcaagactagcttggccaacatggtgaaacaccatctctcttgaaaatataaaaactatccaggcatggtggtgcatgcctgtaatcccagctactggggaggctgaggcacgagaatcacttgaaccctggaggtggaggttgcagcaagccaagattgtgccactgcactccagcctgggcaacagagcgagactctggctcacaaaacaaacaaaaaaa

SEQ ID NO: 2991 - DNA, 686 bp, Homo sapiens
  source 1..686: mol_type = other DNA
cctttccactcaattttaatgaaagagatttcagtaggaccacttggggagctgaagtttgaagacagagtggaattgactttgaatcctgttggacaatgtaaatgtcacacttggattagctaactgcttcagccttcgattcaagaagagcttcctacaatgttgataatctgcttaaattcccagaattcgtcagtgcaaaaatagatgaatatagcctgtgagccatatttgtgttcccaagcatgaaaagaagctctctaacagaacacctggaaggatactggacatcataagggagaaagttgtgtggaatagatccctaaaaaggtgagctgaggatgacacacaatgagaggaaactctattacccaacacataggaagtacagtcgaatgttcccagtgggttcctctgatacgcacccaaaagcacccaaagggcataaactaccctccctggatagtggaaagtgcagtaaagacagtaacagtaaaatgggggttcctggatatccacacttcacccctctgcaactttgatcactgtgcagtagaaactgtccttaagaagatgctgaaggaggaatgcaagccgaaggtggggaagaacagaaggttctcccctcagcttctgaggccgggaatatcttgcctgcagcagatcccatctaggcaaaagga

SEQ ID NO: 2992 - DNA, 453 bp, Homo sapiens
  source 1..453: mol_type = other DNA
atactattctccttgcagatacttcccaaattgatatctccaatccagactcctttcctgagtacgaagctcatatatccaactttctactcaatatctccacttggctacaccttaagatgtcaatctttatatgtctgaaatcaggtttttaacactcatttcacaaactgctcatttattgaagccatttccatcttaatccacgataactattcttttagatactaagatgaaaacctggaagccaggcttcactcattattttctctactattttgtcgaggaatgttttctccaccgttttcttagtcattcagtaaaacctgtccgtgcttcctttgaagattccttgcagaatctcaccacttcctatcacctcctttgttaccatgctagtctaagccaccaccatcttttacataaatggttgcaatacacttctaaaagtct

SEQ ID NO: 2993 - DNA, 60 bp, Homo sapiens
  source 1..60: mol_type = other DNA
gtttaggtactagtgcagtgtagaacccttttctcaggcaaaacctaacatctgaccgca

SEQ ID NO: 2994 - DNA, 2727 bp, Homo sapiens
  source 1..2727: mol_type = other DNA
aaaaaagaacttataccaatcttactcaaactattttaaaaaataaaagcaaagaaaatacttccaaacacattgtatgagggtggtattatcctgatatgaaaaccagacaaagacacatcaaaaatagaaaaccacaagccaatattgctgatgaatattgatgaaaaaattctcaataaaatactaacaaacagaattcaacaacacattacaaaaatcaatcattataacaatatattacaaaaatcactcattaatccctgggatgcaaggatggttcaacatatgcaaaccaatcaatgtgatacatcctatcaagagtatgaaggataaaaaccatgtgattatttcaattgatgctgaaaaagcatttgataaaattcagcatcccttcataataaaaaccctaaaaaaactgggcatagaagaaatatacctcaacataacaaaagccacatatgacagacccataactagtatcatactgaatgaggaaatactgaaaatttttcctctaagattgggaatatataagaatgaccattgccatcactgttattcaacattgcactgtaaatcctcgctacagcaatcaaacaagagaaagatataaagctcatccaaattgaaaaggaggataagtaaaattatccttgtttgcagatgataagatcttatatctggaaaaatctaaagactccccccaaaactattagaactgataaattcagtaaagttgcaggatacaaaatcaccatataaaaaccagtagcatttctatataccaacagtgaacaatctgaaaaggaaatatttaaaaaatcccatttatgataatcatatataaaattaaatatgcaggaactaacttaaccaaacaagtaaaagatctctataacgaaaactataaattgatgaaagaagttgaagagtacatcaaaaaaaaaatgaaaaaacaaatccatgttcaaggattggaaaatcaatattgttaaaatgtccattctacccaaagaaatctatagattcagtgtaatccctatcaaaattcccatgacattcttcaaagaaatagaaaaaaatcaatcctcatactaatatggaaccacaaaagaccgagaatagccaaagctatcctaagcaaaaagaataaaactggaggaatcacattacctgacctcaaattatactacagagctatggtaacaaaagcagcatggtactggcataaaaacagacacatagaacagtggaacagaatagaaaactcaggcacaaatccacgcacctacagtgaactcatttttttttttttttttttacaaaggtgccaagaacatacactgggaaaaagacagtctcttcaataaatagtgctgtgaaaactggatatccatatgcaaaaacaaaactagacccctgtctctctcaaatcaaatcaaaatggattgaagacttaagtctaagacctcaaactgtgaaagtactacaagaaaacatgggggaaagctctacaacatgggtctaggcaaagacttcttgagcaatactccacaagcacaggcaaccaaagcaaacatggacaaatgggatcacaccaagtttaaaagattctgcccagtaaagaatacaatcaacaaagtgaagagacaatccacagagaatgggagaaaatattttcaaactacccatgtgataaggaattaataactggaatatataaggaactcacacaactctaggaaaaaaaataataatccagtcaaaagatgggcaagttttgaagagacatttctcaaaagaagacatacaaatggcaaagcagcatacgaaaaggtgctcaacattactcatcatcagagaaatgcaaatcaaaactataatgagatatcatctcacctcagttaaaatggcttatgtccaaaatacaggcagtaacaaatgcttgcgaggatgtggacaaaagagaatccttgtacactgttgggtggaatgtaaatttgtacaaccactatggagaacagtttggagtttcctcaaaaaacaaaaattgagctactacatgatccagcaatttcattgctggttatatacctaaaagaaaggaaatgagaatattgaagagctatctgcacacctatgtttgttgcagcactatttacaatagctaagagttgaaaacgacataagtgtctatcaacagatgaatggataaagataatgtggtacatatacatatacacaatggagtattattcagctataaaaaagaatgatatcctgtcatttgcaacaacatggatggtactggagatcgttaagtgaaataatccaggcacagaaagacaaacacccatgttctcagttgttttggggatctaaaaatcaaaaagactgaagtcatggacagagagagtagaaaggataggtaccagaagctgggaagtggtagtgggggattgtgggtagaggcggggatggtgaatgggtaaaaacattttttaaaaaatagaaagaatgaataagagctactatttgataacacaacatggtgactatattgaagaataacattttaaaataatagtgtaattggattgtttgcagctcaatgaaggtgatagatactccattcttgatgatgtgcttatttcacattgcatgcttatatcaaaacatctcatgtaccacataaatatacacacctactctgtacccagaaaa

SEQ ID NO: 2995 - DNA, 2242 bp, Homo sapiens
  source 1..2242: mol_type = other DNA
aaagcttttgataaaatccaaaatcctttcatgataaaaaccctcaagaagctagacactgaaagaacatacctcaaaataatagaagctacctatgacaaactcacaaccaacatcatactgaatgggcaaaaactggaagcattccctttgagaagtagaacaaaacaatgatgcccgctctcaccactcctattcaacatacaactggaagtgctagccaaagcaatcaaacaagagaaagaaataaaaggcagccaaataggaaaataagtcaagctatctctcttcatatatgatatgattctttattagaatcataattattatagtagtgattattttaataatcatagttatttccattataactagtagaaaaccatagaggccaccaaaagactcctggaactgataaataacttaaatagagtttcaagataaaaaataaatgtataaaaaccagtagaatttctatacatcaataaagctcaagctgagagccaaattaaaaatgcaatcccatttacaatagtcacacaaaaaataaaatatttccgaatacatctaacccagagtgtgaaagatctctacaaggagaactacaaaacactactaaaagacaaagaaatggaaaaacactccaggctcatggattgaaagcatcagtatcgttaaaatggccagactgcccaaagcaatctacagattcagagatattcctattaaactaccaatgtcatttttcacaggatttgaaaaaactattctaaaattcacatggaaccataaaagagcctaaataggcaaagcaatcctaagcaaaatgaacaaatctggaggcatcacaatgacctgactttatactataaggctatagtaaccaaacaacatggtcctagtagaaaaatagacacaaagatcaatggaacagaatcaagaccccaaaaataaagtggcacacctacagcctatctgatattcaacaaaattgatttgaaaagtaagcaagggagaaaggacttcctattcttgatgctggctagccatatgcagcagaataaaactggacctttacttttcaccatatacaaaaatttaactcaagatgaaataaaaatgtaaatgttaagacttcaaactataagaatgctagaagaaaacctaggcgacaccatttggacattggccttgggaaaaaaatttatgactaagttctcagaagcaatcacaacataaacaaaaattgacaaagtgggacctaaagagcttctgcacagcaaaagaaactatcaacagaggaaacagacaacctacagaatgggagaaaacatttacaaattatgcatcaaacaaaggcctgatatccaggatctatatggaacttatacaattgaataattaaaaaagctattaaaaagtaggcaaaaaacatgaacagacacatcttgaaagacatacaagtggccaagaaatatatgaaaaaatgttccacatcactaatcatcacagaaatgcaaattaaaaccacaatgaggtactgtctcaggccagtcagaatggctattgtctaaaagtaagaaacaacagatgctgctaagactgcgggaaaagggaacacttacacactggtcatgggaatgtaaatgagttcagccactgtggaaagcagtctggtaatttctcaaagaacctggactatcattctacccagcgatcccattactggctatatagccaaaagaaaacaaagcattctatgaaaaagacacatgcactggcatgttcatcagagcactattcacaatagcaaagacatggaatctacctacgggcccaacaacagaggactgcataaagaaaatgtggtacatggactactatgcagccgtaaaaaacaatgagatcctatcctttgcagcaacatggatgcagctggaggacactgtcccaagttaattttttgccaaatagaaaaccaaatatcacatgttttcacttataagtgggagctaaatattcggtacgcatggacataaagatggcaatgatagacacttgggactctaaaggtgggaggaagggaggaggtcaatggctgtaaaactagctattgggtacgaggctcagtacctgagtgatgggatcatttggccccaaacctcagcattatgcaatacagccaggtaacaaacctgtacatgttacccctggatctaaaataaaagttgaaaaaaaaaaa

SEQ ID NO: 2996 - DNA, 533 bp, Homo sapiens
  source 1..533: mol_type = other DNA
cccagccatcccattactgggtatatacccaaaggactataaatcatgctgctataaagacacatgcacacgtatgtttattgaggcactattcacaatagcaaagacttggaaccaacccaaatgtccaacaatgatagactggattaagaaaatgtggcacatatacaccatggaatactatgcagccataaaaaatgatgagttcatatcctttgtagggacatggatgaaattggaaaccatcattctcagtaaactatcgcaagaacaaaaaaccaaacaccgcatattctcactcataggtgggaattgaacaatgagatcacatggacacaggaaggggaatatcacactctggggactgtggtggggtcgggggaggggggagggatagcattgggagatatacctaatgctagatgacacattagtgggtgcagcgcaccagcatggcacatgtatacatatgtaactaacctgcacaatgtgcacatgtaccctaaaacttagagtataataaaaaaaaaaaa

SEQ ID NO: 2997 - DNA, 294 bp, Homo sapiens
  source 1..294: mol_type = other DNA
gccgtggctcacgcctgtaattccagcattttggggggccgaggtgggcggatcacctgaggtgaagagttcaagatcagcctggcccacatggtaaaaccccctcgctactgaaaacacaaaaattaactgggcgcgatggtgggcactcgtaatcccaactactcaggaggctgaggcaggagagtcgcttgaactgggaggcagaggttgcagtgagttgagatcacgccactgcactccaggctgggccacagagcgagactgtctcaaaaaaaaaaaaaaaaaaaaaaa

SEQ ID NO: 2998 - DNA, 303 bp, Homo sapiens
  source 1..303: mol_type = other DNA
gatgaggtggcctccacctgtaatcccggcactttgggaggccaaggaatgtggatagcttgaggtcaggagttcgagaccagcataggcaacatcgtgaaaccctgtctctactaaaaatacaaaaactagctgggtgtgatggtgcatgcctatagtcccacctacttgagagactgaggcaggagaagtgcttgaatctgggaggcagaggttgcaatgagccaagactgtgccactgtactccagcctgggcgacagaacaagactctgtcttaaaaaaaaaaaaaaaaaaaaaaaaaa

SEQ ID NO: 2999 - DNA, 66 bp, Homo sapiens
  source 1..66: mol_type = other DNA
tctcaagcacatagcagctgttgttttcatattaaagatcagtaagtgtttgttgaatgaatgtat

SEQ ID NO: 3000 - DNA, 657 bp, Homo sapiens
  source 1..657: mol_type = other DNA
acctaagcccaaaaaactcaggtcatttcttgcctgtactgttgcaatagcctcataataactagtcttctcctttatcaaccacagtcgtctccgctacacaaagaagagagggtgctaatctaaagtgtaaattattttaaatcagcacccttcttgtaatttcccagtggtttttcctgtcataagaataacatgcaaaattccttgcttgcaaagccaggtatgaccttgccccgtctaccttactggcatcgtctctcatgactcttcccctttttcactctccatcttgccttttcccaaccatgcctgctagtgagccttagcccttgtgttttctctgccagggatgcatgactggcttctttactttattctgatctctctgctcaaatgtcatctttttagagatagctttcctaaacatctttaaaagtaccccatgaactgtgaaacacctttcctgctttttcttcatagtacttatcacttcctgatattatgttagacaacaagcaaataagtatatgctgttcccactaaaatataagctccatttgaacaggagccttgattattcctgagtatacccctagtgcccagaacctagtagggctttaataaatattagattcatttgttgaatgaaaaaat

SEQ ID NO: 3001 - DNA, 285 bp, Homo sapiens
  source 1..285: mol_type = other DNA
atgtaccatcacacatcagtagtagaagaggaatacatcctaaagacagcacaaatctcccatttggaacccttccagactctgtactatgtgtctctttctttgactgattttatgaatcattcccctgtaataaataaaactgtgagtataataagtttcagtgagttctgtatttctagtaaattatggaatctgaaggtggtttggggcaatatggaacttgtggttgggtgtcagaagtaaaggtggtcttctctttaactttgtagctggattctaatt

SEQ ID NO: 3002 - DNA, 266 bp, Homo sapiens
  source 1..266: mol_type = other DNA
agcactttgggaggccgaggcaggcggatcacgaggtcaggagatcgagaccatcctggctaacactgtgaaaccccgtctctactaaaaaaaatgcaaaaaattagccaggcgaggtggcaggcgcctgtagtcccagctactcgggaggctgaggcaggagaatggcgtgaacccgggaggcggagcttgcagtgagccgagatcgcgccactgcactccggcctgggcggaagagcaagactccgactcaaaaaaaaaaaaaa

SEQ ID NO: 3003 - DNA, 775 bp, Homo sapiens
  source 1..775: mol_type = other DNA
ggtacagacaccatggaaaacaatcaggcaatcttataaaataaacatgccgttaccatgtgatttagcaattggactcttgagcctttaaactagacaaatataattcatgattatacaaaaacctgtacagaaatgattatagcaaaaacaggaaccaacttggtacttcaatgggcaagtagttaaataaaatttgtggtacatccctaccaggggatattactcagcaaaaaaagaagaatgaactgttaaaatgacttggattaatcttcagagaattatgctaaggaaaaaaaaggcaatcccaaaagtttacatactgtatgatttcatttacacaaaattctttaaaggacaaaaatttagaaatggagaaaagaccagtagttgctaggggtcagggctgggcagggacagggcacaggaaggagggcagagtggctataaaagggaactataaggaatctgtgatgaaggaacagttctgtattttgatgtggtggtagatacaacctacacatgtgataaagttgcacagaactaaacacctacacacactcacaaacacacaaaggagtacaattaaaattaggaaaatatgaataaggtagtatcattgtcaatattctagtagcaatattgtgactaagatttgcaggatattgctattgggaaaactggataaagggtacacaggatttctctgtgttatgtcttacaactgcatggaaatctagaattatctcaaaacaaaaatgttaattacaagaaa

SEQ ID NO: 3004 - DNA, 56 bp, Homo sapiens
  source 1..56: mol_type = other DNA
atctgttgcattttgctctttttcactgtggctattagacaatttaaaattacata

SEQ ID NO: 3005 - DNA, 201 bp, Homo sapiens
  source 1..201: mol_type = other DNA
cagcacagtgagtggttaaaaaaagaatctaaaactaagcaacctgggtttggatgctgggtctgtcccttactggctctgtgatttgttaaggtatttaatgcctttgttcctcagttttcttatctgtgaacagggtgactgtagcagtactgatgtcattaggttggtttgagggttgagtgagttagtacatgtaaa

SEQ ID NO: 3006 - DNA, 94 bp, Homo sapiens
  source 1..94: mol_type = other DNA
aaacccttctaaccctttacccaagagtaggtttaaatcctcatatagacttccattgcagtcaatgtccttgttaaaattgtaattacatgat

SEQ ID NO: 3007 - DNA, 368 bp, Homo sapiens
  source 1..368: mol_type = other DNA
tgatatggtttggccatgtccccacccaaatctcatcttgaattgcagctcccacaattcccacgtgttgtgggaggaacctggtgggaggtgattgaattatgggggcaggtctttcctgcattgttctcatgatggtgaatgagtctcacgagatctgatggttttaaaaacaggagtttccctggacaagctctctctttgcctgttgccatccatgtaagacgtgacttgctcctttttgccctccaccatgattgtgaggcctccccagccatgtggaactgtaaatccattaaacctctttcttctgtaaattgcccagtattgggtatgtctttatcagcagcatgaaaacagactaatac

SEQ ID NO: 3008 - DNA, 123 bp, Homo sapiens
  source 1..123: mol_type = other DNA
tgattgtttcatatttttctccactactggaatctaaatacctatgaggccagtgacctcatctatctgatttagtgctgtatcctcattgctagcacagaactagttaagagaaggcactta

SEQ ID NO: 3009 - DNA, 300 bp, Homo sapiens
  source 1..300: mol_type = other DNA
gtgtggtggctcaggcctgtaatcccagcacttagggaggccaaggcaggcggatcacctgaggtcaggagttccagaacagcctggccaacatggtgaagcccagtctgtactaaaaatacaaaaaattagccaggcacggtggtgggtgcctataatcccagcaactctagaggatgaggcaggagaacctcttgagtcctggaggcagaggttgcagtgagccaagcgccactgtactccagcctaggcgacagagcaagactccgtctcaaaaaaaaaaaaaaaaaaagaaaaaaa

SEQ ID NO: 3010 - DNA, 267 bp, Homo sapiens
  source 1..267: mol_type = other DNA
caataccttgggagaccgaggtgggcagatcacaaggtcaagagttcgagaccagcctgaccaacatggtgaaaccccttatctactaaaaatacaaaaattagccaggcatggtggcacatgctggtaatcccagctactcaggaggctgaggcagaagaatcgcgtgaacctgggaggcggaggttgcagtgagccgagattgcgccactgcactccagcctgggctacacagctagattccatctcaaaaaaaaaaaaaaaaaa

SEQ ID NO: 3011 - DNA, 699 bp, Homo sapiens
  source 1..699: mol_type = other DNA
tgttacagtaggtagctagtcaggaataggcaggacagatggttccacctcaacacacaccaggaatgtcaggcaaccatcaggtgatggtcaggtggttgttaactgtctctctaaaataatacttggtgacagccggcatcagggaaaggcactctcccaatagatagaaaacacctgaaactcagtagcttcccgacaagatctcaggagttgggtgagtgagctccagcatgtgcattaagaagcaaaatggcagaatttaactggtaaatgacctcctaggagcattcagccggtaagggaagaacgcctaagtgagcatgcgtacaactctagtaaacacactgtgcatgctcccctcccaagcgcaagcaggccactgtgcacgtggacagcccaccccaatggaagaaccagggtgaagtaacgcaagatcctggaagtaagccatcatataaaactccaagtcaaaaggtcaaaccgtgcacttgatctctcaagtcgcctgcttggccctcttctaagtgtaatttacttcatttcattcctgttctaaagcgttttaataaactttcattcctgctctaaaacttgcctcaatctccctttctgccttatacccattggtcgaacattttcttctgaggaggcaagaactgaggtttgctgaagacagtatgaatctgcctctagtaa

SEQ ID NO: 3012 - DNA, 315 bp, Homo sapiens
  source 1..315: mol_type = other DNA
gcccagtgcagtggctcatgcctataatcccagcactttgggaggctgatgggggtggatcatttgaggtcagaggtttgagaccagcctggccaacatggtgaaacccttctctactaaaatacaaaaattagccaggtgtggtggtacacgcctataatctcagctacttgggaggctgaggcaggagaagtgcttgaatctgggaggcggaggggaggcggaggttgcagtgagccaagattgtgccactgtactccagcctgggcgacagagtgagactccgtctcaaaaaaaaaaaaaaaaaaagaaaga

SEQ ID NO: 3013 - DNA, 214 bp, Homo sapiens
  source 1..214: mol_type = other DNA
catgagttgggaatctatgcctgtgggccaaatcttgtctgtgcctgctgtttttgtaaataaagtcttattggaacacagacatgactacttgcttgttttgtctgtggctgcctttgtgctacaatggcagagtcaagtagttgttaacagggaccttatgacttaaaatatctactttctggctctttacagaaaatgtttgccgatccct

SEQ ID NO: 3014 - DNA, 186 bp, Homo sapiens
  source 1..186: mol_type = other DNA
catggagagttctgagggtagaccctgggctggcatccagcactgccactaattagctctatgaccttgggcaggtttaacttctgtaggacagttttctcatatgtaaaaggaggatgatggtagtacttacccatttcataggatattataaaaattaaattattcaatacattagcatgccta

SEQ ID NO: 3015 - DNA, 160 bp, Homo sapiens
  source 1..160: mol_type = other DNA
tggacaaaaaaggcaaagaattttatagtacacaggaaaaaatacacagccaataaacctatgaagatatgctcaatctcatagtcgtcagggaaatgcaaagtaaaacagtgatataacattgttttttaaaaccctgatgggcaaagactaaaaaggc

SEQ ID NO: 3016 - DNA, 296 bp, Homo sapiens
  source 1..296: mol_type = other DNA
gctgggtgcggtggctcacacctgtaattccagaagccgaggcgggtggatcacttgaggtcaggagttcaagaccagcatggccaacatagtgaaaccccgtctctactaaaaatacaaaaattagccgggtgtggtggcatgcacctgtaatcccagctactgggcatgctgaggcagcagaatcgcttgaacccaggaggcagaagttgcagtgagccgagattgtgccactccactccagcctgggagacagagtgagactccatctcaaaaaaaataataataaaataaaa

SEQ ID NO: 3017 - DNA, 181 bp, Homo sapiens
  source 1..181: mol_type = other DNA
gcaacatagtgagacgtcgtctctacaaaaaaaaaaagaaaaaaaaaattagccaggcatgcgaaacgctgaggtgggaggatcagatgagcttgggaggttgaggctgcagtgagccttggtcatgccactactgtgttctagtctgggcaacagagtgagaccttctctcaaaaaaaaa

SEQ ID NO: 3018 - DNA, 108 bp, Homo sapiens
  source 1..108: mol_type = other DNA
tccacatctaagttcctgtcattaaaatggagacagcaaagccgaccctatccagtccttgggactgttatgaacagaaaatgatgcaatgtatgaaaaactgctttg

SEQ ID NO: 3019 - DNA, 2955 bp, Homo sapiens
  source 1..2955: mol_type = other DNA
ttggaattgctggcaaagtgccagcgatcagagatggctcccccagtccccaggagtggacctggtgagggggtcacctctctcccccttgtaccacagagcatagctgcaaatccaaggatacacaaaggagccatgctgccaagtaagagcccgtcttccatccattgctctcaagcactatctaccagatcgcagcccaaactacaacaacaacaaaaaagtcactctgccacttctccctgctgataaaccaagggcaagaattcaaccacaaagacccttacagagccttagccctctgaaaacttccggatacaaagccaactgactatgctagattaccatcacagttaaaggaacccagccttctcagatgggaaaaaaatcagaataagaactctggcaattcagaaagccagtgtcccctcacctccaaacaggcccactaggttcccagcaatggttaatcagtctgaaatgtctgaaatggcagacatagaattcagaatctggatggctaggaagcttatcaagaccaagagaaagttgaaactcaatccaaggatgcaaagcaattcagtaaaatgattcaagagttgaaagactaagaagccgttttaagaaagacccaaaattgaacttcttgaactgaaaaattcgctacgagaatttcaaactacaagcagaactattaacagcagaatagaccaagcagagaaaagaacctcagggcttgaagacagttaattaagtcaactcagtcaggcaaaaataaagagaaaaaataaagaaaaatgaacaaaacctctgagaaatatgcaattatgcaaagaaaccaaatctatgactcattggcattcttgagaaagaaaaataataagcaacttggaaagtatatttgaggacatagtccatgaaaatttccctaaactcattagagaggttgacctgcaaatccaagaaatatagaggaccctagccagatactatacaagacatccatccccaaggcacgtggtcatcagattcactgaagtgaacacaaaagaaaacatcttaaaggcagcaagaaagatggggaatgtaacttacaaagggaacccatcaggctaatagcagacctttcggcagaaaccttataagccagaagagattgggggcctatttttagcatcttgaagaaaaaaaattctaaccaagaatttcatatgctgccaaaccaagcttcttaaatgaagatgaaataaaatccttctcagaaaagcaaattctgagggagtatatttaaactagaccagacttacaagacatccccagaagtggacctggtgagggagtcctcagatcctcaggtccccggtgagggggacctggtgagggagtgctaaacatagaattgaaagagcctgctaccacaaaagacacttcagaccatagcccacaagaactataaagcaactgcgtaattaagtctacataacagccagttaacaacacaatgacaaaattaaaatcattcccatcaatagtaaccttgaatataaatgggcttaatgcccacttaaaagtcacagagtggaaagcctgataaaaagacaagccccaaatgtcagtttgcttcaagaaatccatgtcacatataataacacccacaggctcaaagtaaaagaatggagaaaattctaccatgcaaactgagaggaaaaaagagcaggagtcactatacttatatcagataaaacagactttaaataaaaaatcaagaaggacaataaaaggcattacataatgataaagggtacaatccaacaagaagccctaactgttctaaatatatatgcacccaacattggagcacccagattcataaaataagttcttcttggccaacgaaaaaccttagacaaacacaaaatactagtgggaggcttgaacatcctactgacagcgttagatcatcagggcagaaagttaacaatgaaactctggatttaaacttgacacttgaccaactggatctcagacagctacaggacactacacccaacaaccaaaaaatatacatttttcttgtctgcacacagaatgtattctaagatcaaccacatgcttgatcataaaaagtctcaataaattcaaaatgattgaagtcataccaaagcacattcttgaatcacagtacaataatagtagaaatcaatatcaagattgcctcaaactatacaaatacatgaaattaactaacttactctagcataactcctgggtcaacatcaaaattgaggcagaaatcaaaaaaatcgtttgaaattaatgaaaatagggacacaacttaccaaaatctctggatgcagccaaggcagtgttaagaggaaagtttatagccctaaatgtcttcatcaagaagttaaaaaaatctcaaattaacaatctatctttggaaaggaagaaactaggtcaactaagggaaaggaactagggaggagaaaatccaaaactagcagaagaaaaaccactgaaattagagaagaacttaatgaaattgacatgtaaaaatccatacaaaagatcaataaaaccaagacttggtttttcaaaaaaataaaatcgataggccactagccagtttaacaaagaaaaagaaagagaagatccaagaaagcacaatcagaaatgaaaaaggtggtttttttttttatcagtatcataactggtcccacagaaatacaaaagaccttcagaaactattatgaataactctaagcacacaaattagaaaatctagaggaaatggatactttcctgtaagcacacgattttccaagattgaatcaggaaaagactgttaacgtgaatagaccaatatcaacttctgaaatggaatcagtaatgaaaaacctaccaaccaaaaaagccctggaccagttggtttcccagctgaattctaccaga

SEQ ID NO: 3020 - DNA, 172 bp, Homo sapiens
  source 1..172: mol_type = other DNA
ttacaaattgtgagaattcacataacaacctggaattcctcattctctgaaggatcagatctggccccatcagattttcccatggcaacactcagttggagctgagccactgtagagcttcaggtggggcatgcacccttacttaaccaccatcccaccactccctgttgtc

SEQ ID NO: 3021 - DNA, 271 bp, Homo sapiens
  source 1..271: mol_type = other DNA
ttgggaggccgaggcaggcggatcacctgaggtcgggagttcgagaccagcctgaccaacatggagaaaccctgtctctactaaaaatacaaaataagccaggcgtggtggtgcatgcctgtaatcccagctactcaggaggctgaggcaggagagtcacttgaacctgggaggcggaggttgcagtgagccaagattgcgccactgcactccagcctgggcaacaagagcaaaactccatctcaaaaaaaaaaaaagaaaagaaaaaaga

SEQ ID NO: 3022 - DNA, 124 bp, Homo sapiens
  source 1..124: mol_type = other DNA
caatcttaaccttccaaatggattgagccttagatgtttttttgttaattatctgttaataatttgagcacttttaacaatagaaataatgttgtaagtggtgagtaaattcccaggctagccc

SEQ ID NO: 3023 - DNA, 77 bp, Homo sapiens
  source 1..77: mol_type = other DNA
gatcacaccattgcactccagcctgggcaacaagagcgaaactccatctcaaaaaaaaaaaaaataataataataaa

SEQ ID NO: 3024 - DNA, 276 bp, Homo sapiens
  source 1..276: mol_type = other DNA
ggtcgggcacagtggctcacacctgtaatcccagcactttgggaggccgaggcgggcggatcacctgaggtcgggagttcaagaccagcctgaccaacatggagaaaccccatctctactaaaaatacaaaattagccgggcatggtggcacatgcctgtaatcccagctactcggaggctgagcaggagaatcgcttgaacctgggaggcggaggttgcagtgagccaaaatcgtgccactgcactctacactccagcctgggtgacagagtcag

SEQ ID NO: 3025 - DNA, 256 bp, Homo sapiens
  source 1..256: mol_type = other DNA
tgatcttcttacctgttattgttgcatgtccccagctcagtgcatggctgtcttctgtatgtgcgtccactctcttggtgcctgcatgctgtcctgtgaagttaaataccacctagatgctgatggtgaactgagatacgtctctagctcctgactgcatcatgctcacatgtcccacattgtatctgatagctctttctgaatgtctagtagacatctccaacttaacatgccaaatacacagctcctgattccc

SEQ ID NO: 3026 - DNA, 165 bp, Homo sapiens
  source 1..165: mol_type = other DNA
gggcacagggatgcacgcttgtaatcccagctactggggaagcttaggcaggacgactgtttgagctcaggagtttcagactgtagtgcattatgactgcacctgtgaatagccactgcattccagcccttagcgagaccttgcctctaaaaaaataaaaaataa

SEQ ID NO: 3027 - DNA, 290 bp, Homo sapiens
  source 1..290: mol_type = other DNA
ggctgggcacggtggctcatgcctgtaatcccagcactttgggaggccgaggcgggccgattgcttgaggtcaagtgtttgagaccagcctggccaacatggcgaaaccccatctactaaaaatacaaaaattagccaggcatggtggtgggtgcctgtaatcccaactacctaggaggctgaggcaggagaatcgcttgaacccggggggcagaggttgtagtgagctgagtttgcgccactgcactctagcctgggggagaaagtgaaactccctctcaaaaaaaaga

SEQ ID NO: 3028 - DNA, 210 bp, Homo sapiens
  source 1..210: mol_type = other DNA
gccaagtgcagcggctcatgcctataatcccagcattttgggaggccaaagcaggaggatcacttgagcccaggatttcagactggccttggcaacatggtgaaaccccatctccacaaaaaatacaaaaaaattagccaggtgtggtggcctgtgcctgtagtcccagctatttgggaggctgaggcatgagaacttgggcgagagagg

SEQ ID NO: 3029 - DNA, 181 bp, Homo sapiens
  source 1..181: mol_type = other DNA
accagacttatctctgaatgacttttgtttcaaaaagtcaaacctatcttcatttgataaagatttcctagcattgatatttataaaacactccacaaactctttaatttagaaaagtattctgaaatgtttctgtgcaatggcaccatcataggagtaagtgtgcaacctttcaaggtga

SEQ ID NO: 3030 - DNA, 184 bp, Homo sapiens
  source 1..184: mol_type = other DNA
gagagagactgcctgagtgtgattcttgctccgccacttgctgcgtccttgagtctgtatcaacatctctgtgcttctgtttcttcacctgtgaaatggggatgataacagtacttacatctcaaaaggctgttttaatgtttaaatgaatacttgcaaggcacttggaatactgtttggaata

SEQ ID NO: 3031 - DNA, 314 bp, Homo sapiens
  source 1..314: mol_type = other DNA
gccgggtatgctggcttttacctgaaatcccagcactttgggaggccgaggcgagtggatcgcctgagatcgggagtttgagaccagcctggccaacatggtaaaatcctgtctctactaaaaatataaaaattagccaggtgtagtggcgcgcgtctgtaatcccagctactcgggaggctgaggcaggagaattgcttgaatccgggaggtggaggttgcagtgagcctaggtcgtgccactgccctccagcctgggtgacagagcgactgcgtctccaaaaaaaaaaaggtaaaattaaaattaaaaaaaa

SEQ ID NO: 3032 - DNA, 157 bp, Homo sapiens
  source 1..157: mol_type = other DNA
gccacagggtcccttgggtagggggagacaaagggtgtggctgacagggagactctaggactaccattgccacttccaccagagcagccacacttctgttccacatagttggcatccaaatttgatttgaaaaacagtttccactactaaaagaaaa

SEQ ID NO: 3033 - DNA, 306 bp, Homo sapiens
  source 1..306: mol_type = other DNA
ggccgggcgcggtggctcatgcctgtaatcccagcactttggaaggctgaggcaggcggatcacgaggtcaggagatcaagaccatcctggccaacatggtgaaacctcgtctctactaaaaatacaaaaattagctgagtatgatggcatgcgcctgtagtcccagctacttgggaggctgaggcaggagaatcacttgaacctgggaggcggaggttgcactgagccgagatcttgtcactgcattccagcctgggcaacaggcaagactctgtctcaaaaaaaaaaaaaaaaaaaagaaagaa

SEQ ID NO: 3034 - DNA, 262 bp, Homo sapiens
  source 1..262: mol_type = other DNA
ctgggcacagtggctcacacctgtaatctcagcactttgggaggccaagacaggaggatcacttgagtctaggagttcaagaccagcctgggcaacatagggagaccctgtctacaaaaaatttgaaaattagctgagtgtggtggcactcacctgtagtctcagctactcaggaggctgaggggagggatcgcttgagccagggaggttgaggctgccgtgagctgtgatcctgccagtgcactcagcctgcgtgacacag

SEQ ID NO: 3035 - DNA, 287 bp, Homo sapiens
  source 1..287: mol_type = other DNA
gctgggtgtggtggctcacacctgtaatcccagcactttgggaggccaaggcgggtgggtcacgaggtcaggagttcaagaccagcctggccaagatggtgaagccccgtctctactaaaaatacaaacattagccgggcacggtggcagtcacctgtaatcccaactactcgggaggctgaggcaggagagtcgcttgaacctgggaggtggaggttgcagtgagctgagatcactccagcctgggtgacagactgagactccgtctcagaaacaaaaccaaaaaa

SEQ ID NO: 3036 - DNA, 217 bp, Homo sapiens
  source 1..217: mol_type = other DNA
ggacttggagtcaaaagatctggttttatggtccatcttttaccaatcatttgctgtggatctctttaaaggtcctggaacctttgagcctcagttacctcacttgtaaattggcaaaaatacctacctcacagggttgttgtgaggattcaatgagctaatgtatgttgaaagcactttgtgaattgtaaagtgctacacaaatgttagttgttgt

SEQ ID NO: 3037 - DNA, 785 bp, Homo sapiens
  source 1..785: mol_type = other DNA
acatccctttcttcccttccaaatcgagcaaggatgcctgccctggaagtgtataaacccggggaagggagacagaaaaggatagttttaagtattggtgttggggacgtgttctttagccaaggcagcatgaacccatggcagcacttcccaaccttcctgacatgggcgtttctgtgaactccagtgtgatggagaaatggcattggctcaggtgtgcagctagatatgttacagagcagggtgacaggcaggggtgatgagttttgttttaacaacctgtcccttcaaccctcatggtactgacaaagatcacatggctctcgggggagattcctgcgaggggaagcaaggagagcatccttacatattattgatccaggcagcagatttgcagcaaagctctgtgctttattcatctgttaaaatagttaaaatagtcaaaacataggaaaaggattctgggaagtcagaatcggcttcagagcacacccctcctgcacttgcccggttctcagacttgggaatgggactgggtgggtgggtactctcgggtgttccgcgggtttgggtcttacttgtacactttgcttgatttcaaggaggtgcaggagaacagctctgtgataccatttaacttgttgacattacttttatttgaaggaacgtatattagaggtaagttggtgcatgctattttctgtaacatttattttgagtcataggagaaagattttcagttacttttatccaagattattagacactgtaaaatttcatattta

SEQ ID NO: 3038 - DNA, 547 bp, Homo sapiens
  source 1..547: mol_type = other DNA
taaacatggagttaccacattaaccagcaatgccactcctgggtacacacccaagaaaagtgaaaagaggtgtccagacatactcggccatgaaggtgcacagcaggttactcacaagggctgaaaagcagaaacaaccaggtgtccatcaccgataaatgaggaaccaaaatgtggtctatccacacaatggcttattattcggccacaaaaagaaaccaagtacacgtgctctgacatgcctgaaaataccatgcaaagtgaaataagttagacacgaggccacaattgtgtgattccatttatatgaaatgtccagaacagggaaaacctattttagacaacagagacacaaagtcgatcagcagttgccaggggaggaggaagacgggaggggaaatgattgcttcacggggtgatgacagaatgttccagaacgtgacagaggtggtgcctacacaactttctggatgtactaaatgccgctgattgttcactttcaagtgattgatttttaggttatttgaatttcatctcaattaaaaaa

SEQ ID NO: 3039 - DNA, 152 bp, Homo sapiens
  source 1..152: mol_type = other DNA
aaggagacgtgacaacagaatctgtcatgggatcctggaatagaaaagggcagtgaggagaaaactctgcaaatctgactcaagcgcggactttggttaatgtcaacaatggttatgtgatcgtggaattggctcattaattgtaacaaata

SEQ ID NO: 3040 - DNA, 296 bp, Homo sapiens
  source 1..296: mol_type = other DNA
ggccaggtgcggtggttcgtgcctgtaatcccagctctttgggaggccaaggcaggtagatcacaaggtcaggaaattgagaccatcctggctaatacagtgaaaccccatgtctgctaaaattacaaaaaattagctgggcgtggtggtgcacgcctgtagtctcagctactcaggaggctgaggcaggagaatcgcttgaacccgggaggcagaggtagcagtgagctgaagtcccgccactgcactccagcctgggcaacagagcgagactcagtctcaaaaagaaaaaagaa

SEQ ID NO: 3041 - DNA, 854 bp, Homo sapiens
  source 1..854: mol_type = other DNA
cattagaatcattcgcattagtcagaaacaagagaaagacgcttgagtcctggccaacatgataatatacacaaagtataaatattagaaaggcagagacacaactataattatttgcataattatatgactgtttacctaaaaagttcaaaataatgaacggacaaactattacaagtgaccaagtgtaacatcaatatacatcaatcaacagtgtttactaaaacagcaatacagaattacaacattttatgggaaagtgtcccattcattataacaaaaactttgtggatttcataaaaatccacaaaatactcaagaacaaaccaagaaatgagcacatcggacatcaaagaaatcttaaaaattttgccaaagctctaaattcgttgagagctggaatccattttcaagtagtaggactctaagtcacatgaatgtcaattttccaaactgtccccataaactccgtgcatcccttaaaactcccgcaggactgctgtgggtcttgacactgcttctaaacttgacatgggagaggaaacgtgtaggacccgctgaggaatgcttctgaacggcctcggggagggagcctgctgtaaagctgtcacagttaatgccagtgctactgtgcagaaagagaactcagcccgtgagtcaggactgagacagcagagacagcaagtatttacgggaattttatttacgatgatggtagcatttcatgtcagtcggtggagaaaagattcctttttcaataaatgatgtgacaactggctacgtatttgaaaaagaaaacgttagacccgtatctcacacaaccccaaacaaaattcccgcggattaaagggcta

SEQ ID NO: 3042 - DNA, 259 bp, Homo sapiens
  source 1..259: mol_type = other DNA
gcagcttgggaggccgaggcaggtggatcacaaggtcaggagttggagaccagcctgaccaacatggtgaaaccccgtctctaccaaaaatacaaaaagtagcctggcgtggtggcgcgtgcctatattcccagctacttgggaggctgaggcaggagaatcgcttgaacccgggaggtggaggttgcagtgagccgaaatcgcgccactgcactccagcctgggcgacagagcaagactccttctcaaaaaaaaaaaa

SEQ ID NO: 3043 - DNA, 49 bp, Homo sapiens
  source 1..49: mol_type = other DNA
cctaattagctacaacacggctggaaagctcagctcctactaggctgca

SEQ ID NO: 3044 - DNA, 307 bp, Homo sapiens
  source 1..307: mol_type = other DNA
gtcaggcacggtggctcacacctgtaatcccagcactttgggaagctaaggcaggaggataacttgagcacaggaagtttgagaccagcctgggcaacatagggagactccatctctacaaagaaaaaataaaacaattagctgggcatggtccatgtgcccgtattcccagctactcaggaggctgaggcggaggatcgcttgagcctgggaggttgaggctgcaatgagccaagattgcaccactgcactccaacctgggtgactgagcaagaccttatctcaaaaactaaaaaagtaaacaaaa

SEQ ID NO: 3045 - DNA, 140 bp, Homo sapiens
  source 1..140: mol_type = other DNA
atcaattagaaagagatgactagccagatggaattgcagcccaatcatgtgaacaggcaaaccgcaaaaaataaataaaattaccaataaatatatgaaaaattataatgttgttagtagttaaaatgcgaattaaaata

SEQ ID NO: 3046 - DNA, 43 bp, Homo sapiens
  source 1..43: mol_type = other DNA
ggtccatcgcacatgctcaataaatatttttaaatgagtgaat

SEQ ID NO: 3047 - DNA, 446 bp, Homo sapiens
  source 1..446: mol_type = other DNA
tatttatgcctgattcatggctgaaatttcaggatgaaagctatgaaatctctatttgtgtttgtgtatctattaatgtatgttatgtatatgtgatattttcttaactccagagagcattgcaaaattcatttatgaaatcctctaaaagtgctctattctaacttggcttggaaaaaaataagcatttataaataaatattcaccaaactcctagaaatataggaactgatcaaatgtttcttaagttaacatgatttggataaaacttagttaaataagattaatataggatttttggtgtaataaaacaactatatcttcaaaattatcattattgaatataaaacaagcataaattcctattctgcttgagttctagtcaaataagctaatattatacttactagaaacgtaaaatcttaaagcttatagatttgattcta

SEQ ID NO: 3048 - DNA, 705 bp, Homo sapiens
  source 1..705: mol_type = other DNA
aaaaccatatggttaaattaataaacacaataaaagcgtttggcaaaattaaatattcttacatgacaaaaaacctctcatcaatttagtatagaaaatatatgccttaacacaaaggacataaaggacaaatctacagctaagatcatactgagtgtggaaaaggtgaaagattttactgtgaacaagaaaaagattatactggaacaagaaaaggatgcctattttcaccaatcatatttcacatagtgaaagtcttagccaggacgattaggtgagagaaagaaataaaagacatctgaattggaaaggagacagttaaattgtccctgtttaaagacaatgtgatcttatacatggaaaaaaataagactctaccaaaagcttcttagggtgatacatgaaattaataaagttgcaggatataaatcaacatacaaaaatcagtagcatttctacatattgatagtaaactagctgaaacaagaaattaagaaagcaattccttttacaatagctacaaaaatgtacttagagataaatttaaccaaggaagtaaaagattttgacaacaaaaatgacaaatattaatgaaagaaattaaagaaaacacaaaaaaggaaagacatccacgtttatagattgaaataatattcttaaaatgacccactaccctatgtgatttacaaatttagtacaatcact

SEQ ID NO: 3049 - DNA, 2431 bp, Homo sapiens
  source 1..2431: mol_type = other DNA
cctgaggtgtccatggcagataggaatgctgctttgaggctttggcaggcctccataggtgaatcatggtggaggcctctaatattttgcagcaaggcctggtcatcttctccagttaactactctccttttgagagacagctcttgtcctatactgggcttttgtggaaactgaatatttgactatgagtcaacaagtcaccatgcgacctgaactgcctatcgtgaactgggtgctttctgactcatgtagccataaagtgggtcatgcacagcagcattgcatcatcaaatggaaatggtgtataagtgattgggctcaagcaggtcctggggggtacaagtaagttacatgaggaagtggctcaaatgcccaccctgccaccctgccttctctcccacggcctgcactgatgacctcatggggacttgcctttgagcagttaacacaggaagggaggactagggcctggttcacagatggttctccacaataggcaggtaccgcccaaaagtggacagctgaagcactacagcccctttctaggacatccctgaaggagagtggtgaaggacaatcttcccagtgggcagaacattgagcagtgcacctgattgtgcactttgcatggaaggagaaatttccagatgtgcggttatatactgattcatgggctgtagccaatggtttggctggatggtcagggacttggaagaagcatgattggaaaattggtgacaaagaaacttggagaaagagtatgtagatggacctctctgagtggtcaaaaactgaagatatttgtaccctgtgtgagtgttgaccaacaagtgacttcagcagaggaggattttgataatcaagtggataagatgacccgttctgtggataccactcagcctctttcctcagacacccctgtcattgtccaatgagcccatgaacatagtggccatggtgtcagggatggaggctatgcatggattcagcaatgtggacttccactcaccaaggctgaactgtctgtggccactgctgagtgctcaatttgccagcagcagcagagactaacagtgaaccctttgtatggcatcattccctggggtgatcgaccagctacccggtgacaggttgattatattggacctcttccaccatggaaaggagagaggtttgtcctcattgtaacaggcacttactccggatatgagtttacctacctgcatgcaatgcttctgccaagactaccatttatggactcaaggaatgccttatccactatcacggtattccacacagcattacctctgaccaagcactcactttacaggtgaagaagtgaggcaatgggctcacgttcacggaattcactggtcttaccatattccccatcttcctgaagcagctggattgatagaatggtgggacggccttttgaggtcgcgattacaacgtcaactaggttacaatacttggccgggccggggcaccatactccagaagaccatgtgtgctctgaatcagcgcccaatgtatggtattgtttctcccatagccagtattcacagatccaggattcaaggggtggatatgaaagtggaaccactcactatgatgcactagcaaaatgtttgctttctgttcccacgacattaggttctgctttactagtcatcttagctccagagggaagaacgttgctaccaggagactcaataaggattccattaaactggaagttaagatggccacttggatgctttggggtcctcctacctttaagtcaacaagctaataatggagttacagtgttggcggcagtgattgacccagactatcaagatgaagtcagtccgctactccacaacggaagtgaggaagagtatgcatggaatataggagatccattagggcatctcttggtattatcatgcactctgattaaggtaaatgggaaactataccaaatccaggtaggactacaaatggtccagatcctctccgggtcacgacctgctgagctgcttgctgaaggcaaagggaatacagaatgaatagtggaagaaagtagttatcaataccagctacgaccacctgaccagctgcagaaatgaggactggaactatcatgagtatttccttcttcttttgttaaaaacatgtttgtgcatgtatgcacttgtactaagaaaatatcttcatttcatttcccttttctttatcaggtgacatagatttgctcacctcatatcagcatttaagtattgtttactttatgtaatagtatttgggttggggattggtgcatttccagttgtaggaaggatagtttattatgttggggtaattatgacctaactattgtctgtattttaagattatgtatgatctcaggagatgtgtgtgggttcaagttcacaaggggtgggc

SEQ ID NO: 3050 - DNA, 293 bp, Homo sapiens
  source 1..293: mol_type = other DNA
ccgggtgcagtggcttacacctgtaatcccagcactttgggaggctgaggtaggcagatcacatgaggtcaggagtttgagaccagcttggccaacatggtgaaacttcatctctattaaaaatcaaaaaattagccaggcttgatagcatgcatctgtattcccagctactcgggagactgaggcaggagaattgcttgaacatgggaagcagaggttgcagtgagccaagatagtgccactgcactccagcctgggtgacagagtgaggctctgtctcaaaaaaataaaaa

SEQ ID NO: 3051 - DNA, 1448 bp, Homo sapiens
  source 1..1448: mol_type = other DNA
gcatcacctgccctgtcacctcatcaccgcattactaaagctatactaacagcagtcacttttagtgggtgcttcatgcatgagaataaagggaaaaaattgcaaggcatactaaaatccaaaaaaagaaaaaaatataatttgtgtcaacagagcaagcttcagaaccagacaaagatatgattttggaattttttttaaacctctggagaatatgctaagggcctaatgaatgaactagacagcattcaagtatagatgggtaatgtaatcagaaagacagacatcgtaagaaccttcaacataatgtagtggtaaaaaatgtggtaaataactgaagaatacctctgatggcttattagtagactggactcagctgagtaaagaatctctgagcttgaggatttatcatcagaaacttcgaaaactaaagaaaagaaacactgaaaagaacagaaggtgatatccaagactgtgggacaactacaaaaggtgaaacagagtaatgagaataccaggaggaggagaagaaatagaagaaagttctgcaacaaccatgtctgagaacttccagtattaatgtcagacaccaaaccaaagatccaggaagctctgagaacaccaggcagaataaatgccaacaacctacacttggacatataattttcaaactatatgaaataaaaaataaaggaaaactctgaaagaaaccagaggtggggcagaaaacaccttacctacagagacacaaagataagaactgcattcaacattgcagaaactgtgaaagcaagaagacagtgaaatgaaaaaatcaaaatgttgacagaaaaaacccaccaacctaagtttctgtacccactgaaaacacccttcaaaagtgaaggagaattaaggccttcctcagaaaaataaaaattcaagaaacttgttgccaggagacctgtcttgcaagaaatgttaaatgaaattctttagagggaaacaaaagatatataactgaaacctggatcaacatttttttaaaaagagcattaaagaattgtggtacaataaaaacctatgtatttattcttaattgatctgaccaagaagttcatagacaataacaaatacacacagatagattatgtatgcttaaacacaagtgaaatgagtaacactaatacaaggaatagaatggaaggatgggagggaggaattgtggtacaataaaaacatgtatttattcataattgatctgaccaataagtttgtagataataataaatacacacagatagattatgtatgcttatacacaagtgaaataaggaacaataatacaaggaatggaatggaaggatgggagggaggaatcaggtgttttctttgttaagcaggtagtcacccgtgaagtgggatagtgttatctgaaagtggactttaattggttgtaaatgtatatt

SEQ ID NO: 3052 - DNA, 1545 bp, Homo sapiens
  source 1..1545: mol_type = other DNA
ggcagaaggcccatgaggggaaggtgagacacctggggcaaagaagaaaaaaaaatgcgccgcgaagcggtgtctgggtcatccggggacgaaagttttttcccatcagcccttgcgctgggccccagggacccgggcatccctggttcacgcccagggtgtgcctcaggcgactaggggtaccccaacttggacagaaggcccatgagtggaagttgaagtttgtgggaggagaggtgaggcaccaggggcagagaaaaaaaaaaaaaaaagaggaccgcgtctcagagaagcggggcctgggtcccccacggatgaaagtgccttcccatcaggccctatgctgggcctggtggaccctggcgaccctggttcgagcccagggtgcgcctcgggacagcttggggtaccacaaagcgaacaaaaggtccatgaggggaaggtgaggcacctgaggcagagaaaaaaaacgctcagccgagaagcagtgcctgcgtcccccacggatgaaagtgccatcccatcagccccttcgctgggccctggggaccctggcgtccctggtttgaccctggggtacgccttgggacagtaggggtaccccaaggtgggcagaaagcccctaaggggaaggtgaggcacctggggcagagaaaaaaagaaaaacttcgccgcggagaagcacggcctgggtgccccacagacgaaagtgtcttcccatcagtccctgcactgggacccagggaccctagtgtccctcgttcgagctcagggtgtgcctcggccgctaagtgcaccccaaggggggctttggggacacaaagcccgtgaggggaaggtgagttttgagggaggagaggtgaggcacctgtcacagaaaaagaaaaaaaagaaacccgcgccgcggagaggtggggcttgggtaccccacggatgaaagtgccttcccatcagcccctgcactgggccccggggaacctagagtccctggttcgagctcagggagagcctcgggccactaggggtaccccaacgcggtggaaagcccatgagaggaaggtgagctgtgagggaggagaggtgagacacttgtggcagaaaagaaaaagaaaccgcgccacggagaagtggggcctgggtctcccatgggaaaaaagtgccttcccatcagtccctgagctgggccccgtggacccaggcgaccctggttctaggcctgggtgcacctcgggcccgctaggtgtaccccaaagcgggcagaaggcccatgaggtaaaggtgaggtttgagggaagagaggtgaggcacctgcggcagaaaaaaaaaaaaacgtgcggaagagaagcggggcctggttctcccacggacgaaagtgccttctcatcagcccctgcgctggccccctggactctggcgaccctagttcaaggaccagaagagactctggcatgctagggtaccctaaggaagccagaaagcccacgaggggaaggcgagatttaagggaggagaggtgagtcacttgtggtagaaaaaaaaaaaaaa

SEQ ID NO: 3053 - DNA, 2416 bp, Homo sapiens
  source 1..2416: mol_type = other DNA
agactaaatccaaagctagcagaaggaaagaaataataaagagcataattagagcataaatcaataaaacagaaggttggagagcagtagaatgaaaaaatgtagattctttgaaagatcaagcctttcactatattgactgagcaaaagatggaagactaattattaaaatgataaatgaaagcagagccattactaccaactttacagaaatacaaaaggattacaggagtatactgtgaacaactgtctagcaacaaattaggtgccctggatgaaatggatgaatcgctagaaagacacaaactaccaaagtggctcaagaagaaagagaaaatctgaatagacctataacctaggagattgaattagtaatcgaaagcgattaacaaagaaacatttatgaccaaatagctgcattaactggtgagtcaacctaacatttaaagaagaattaataccatttcttctcaaactcttctgacaaaatatatgaagaaggaatacttgctaattcattttttgataacagcattatccttataccaaagacaaagagagcacaaaagagagaaatacagcactatatcccttatgaatatataagcaaaaatctcagcaaaatactagcaatactagcaaaatactagcagcagcaatactgtataatcaaaggattgtaaactatcaccctttgagatttatccccaaaatgcaagggtggttcaacatataaaaaatcaatcagtgtaatatgctgtaacagtaaaatgaataagcacgtgattatttcaattgctgcagagaaaacattgatgaaatacaacacccttctataataaaaatactcaataaactaggcatagaagggatcttctgcaacatgacaatgggatgtacaaaaacccaacagttaatatcatgatcaatgatgaaacactgaaagctgttttcctaacatctagaagaaaaggatggtgcatttgccacttgtattcaacgtagcactggcagttctagccagagcaattaggcaagacaaagaaataaaaggcatctaaattagaaataaaaaataggtgtaaaattatatctacacatgatcttatgggtataaagctccaaacaaaacacaaaaccgattataactaataaaagaggcaggatgcaaacaaacataggcaaatgagctatatttctatatagttgtaaagaactatgaaaacattttaaaaattccatttataatgacatcaaataatacgttattcaggcataaatctaaccatggtggtatacataaaacattgctgcaaaaaactaaagagagtggaaataagtggaaagacattctgtgttcacgggttgtaagacaatattgttaagatgacaataccatctaaagtaatctacagattcaatgcaataccatcaaaatcccaaaggcatttttgcagaaacaaagaaactcattctaaaatcatacaaaaattcaaaggatctgacagacaaaacagtcttgaaaaagaacattggaaaactcacatttttcagtttcacagcctactacaaatctacagtaatcaagagagtgtggtactggaataagaccaatagactttcagaccaatacaatagaacagatttgagatcctacaagttagtcctcacatatatggtcaatgactgttcaacaaggtggccaagtctagtcaagggaggaaagaacagtctcttcaacaactggatgtcagtgcacaagagagaagttagacccctactttgcagtatatacaaaaattaattctaaattaataaaatacttaaatgtaaggactaaaaatatgtaactcttagaagaaaacacacggtaaacctttatgacctttgagttttaagtgtattttgaaatatgacagaaaagcacagataacaaaagaaaatacacgaaaattagatttaatcaaaataaaaaaccctttatgtatcaaaggatactatcaaggaagtgaaaagacaacccataatatgtgagaaaatatgtatctgataaaatcaaaatgtgtatctgataaaagcttaatattccacaactcaacaacagaatttctaagatcccaattaaaaaataggcaaaggacttgaacagacatttctccaaagaagatacacaaatgtctaagaaggaaaagaaaagatgctaaacaccattattcattaataaaatgcaaggcaaaacccaaatgagatgccactttgcatccactagtaaggctttcataacaacgacacagaaaatcaatgttgctaaggaggtggagaaactggagccctcatgaactggctgctaggaatagaaaatgatgcacttgctgtggaaaacagtttggtggttcctcaaagaatcacacagaga

SEQ ID NO: 3054 - DNA, 271 bp, Homo sapiens
  source 1..271: mol_type = other DNA
atctaatccaggaaaagagtacaaaacgccacattctcacttgtattgggagctgaaaaatgggatcacatggacgcaggaaggggaacaacacacactggggcttttcgggagacagagcgttaagaaaaacagctgttgcatgctgggcttaatacctaggttatgggttgacaggtgcagcaaaccaccatggcactcgtttaccttagtaacaaatatgcacatcctgtccatataccccagaacttagaaacagaacgaaacaaaa

SEQ ID NO: 3055 - DNA, 258 bp, Homo sapiens
  source 1..258: mol_type = other DNA
tttttctaaattttttgcaatatctgcaacaataaaatggtaaatgtaatggcctccctgcgtgttgtgagctcttccagcaaatggatgcaactataacagggagtggtggaaacctgatttataaccagctgctgagaaaagcagctaaaacaacgtagggctttccattgttattaatgggaggacagtcttgcaggactcggccctttggaatctaatgttatgtcccggtagatagcgtcaccattgaattca

SEQ ID NO: 3056 - DNA, 67 bp, Homo sapiens
  source 1..67: mol_type = other DNA
gagatccacagatctgtgttgtaacaagccctccccctgaccatgatgcatggcggtttaagaataa

SEQ ID NO: 3057 - DNA, 500 bp, Homo sapiens
  source 1..500: mol_type = other DNA
attgaagagaaagtgaactttcaaactatcttatttacgtttatgtttcagttatcccacaaaagcaggaaatcactttcaacaatgcacctgagatattttacagtaactctcttgttatttccaggtatcaggtggagaaatacggatcagacacaaagacaataatgttcattgctctctagctgaatactttttctcaaatgggtttattagtaaattgatgacaacttgatttgatgtttactctgattgatgtgtgatgtaaagttcttcctaaagccccctttcttttcctttttaaaattattaatgtagacgaatacagagaatgtgaacatattagatatatagatatcacaacaggagaacagtcaatgttatgttttagactatttcaaccctaaaatgtggacacaggttggaatgaggatccatttcagcataatagcctccaatggagtggggaacatataaaatcctgtgttgctttatgaaat

SEQ ID NO: 3058 - DNA, 463 bp, Homo sapiens
  source 1..463: mol_type = other DNA
tgtaaaaattgatcatatgaattgggtcattcttgtcacaccaaataaaaccatcaagaagccagggggaggaggcattcagggcaaaaacaccactccaaaagcgtaattctcttcatgcctggctgctgaaattacctgctttaagctgaagccagttttatcaaatggttactgcaacaacctcttgaacactaagactagctttacccaccactgtccctcacctatcagagcctaccagctcttaaaaaccttactggtgccagtgaactttctcaaagagaaatacataccgtttttctctctgtctcccgtttttataaaacctctaactttctctttatcttttggacatactaaagacacccattctgcatgtatgtgtgaaattgttatacttgtatctcaaataaaacattttaatttcagatgtttgtctctatatttatttgactttgac

SEQ ID NO: 3059 - DNA, 588 bp, Homo sapiens
  source 1..588: mol_type = other DNA
tgagggagaaggaaaggaaaattagttgagtaaacaagtaagagactggtcctcagggaagctgtcagcctgaaaaatcacaactactgcacctacagataagtcctgaacagataagcatgcaaggtccagcacacatgccttctgtctttgtgtaattggcaagctcccaggtaaaattttcctccctttttcaggcatatacatggcggcctctgtgggaacttgcacagggaggaggtgggcttacctaaaacaaacccacagttatacaaacaagagaagcccactttatgcttgactagacacatacccacagctggatatataaagggaattgtgcagacagttttatatagagctgagaggagtttcttataaaagctttttgattcaacagtaaaaacggcaatccagttggactcctttgtctgctgcagagagcttcctcctttttcttattaaactttcactccaacctcacccgtgtgtccctgttccttaatcatcttggtggtgagatgaagaactccacgtgatacctcacaagagagactgctacattgtggtgcattggtgagactgcaa

SEQ ID NO: 3060 - DNA, 1533 bp, Homo sapiens
  source 1..1533: mol_type = other DNA
cagaaggtccatgaggggaaggtgagacacctggggcaaagaaaaaaaaaatgcgccgcgaagcggtgtctgggtcatccacagacgaaagttttttcccatcagcccttgcgctgcgccccagggaccctggcatccctggttcacgcccagggtgcgcctcgggcgactaggggtaccccaactcggacagaagccctatgagtggaagttgaagtttgtgggaggagaggtgaggcaccaggggcagaaaaaaaaaaaaaagaggaccgcgcctcagagaagtggggcctgggtccaccacagatgaaagtgccttcccatcaggccctatgctgggcgtggtggaccctggcgaccctggttcgagcccaggttgcgcctcgggaccgcttggggtaccacaaagcgaacaaaaggtccatgaggggaaggtgaggcacctgaggcagagaaaaaaaaacgtgccaccaagaagcagtgcctgggtcccccacggatgaaagtgccatcccatcagccccttcgctgggccctggggaccctggcatccctggtttgaccccagggtgcacctcgggccagtaggggtactgcaaggtgggcagaaagcccctaaggggatggtgaggcacctggggcagagaaaaaaaaaaaaacttcgccgcggagaagcacggcctgggtgccccacgaacgaaagtgtcttcccatcagtccctgcactgggaccggggaccctggtgtcccttgttcgagctcagggtgtgcctcagccgctaagtgaaccccaaggggggctttgggcgcacaaagcccatgaggggaaggtgagttttgagggaggagaggtgaggcacctgtcacagaaaaagaaagaaaaaacccgcgccgtggagaggtggggcctgggtcccccacggatgaaagtgccttcccatcagcccctgtgctgggtaccggggaacctggggttcctggtttgagctcagggagagccttgggccactaggggtaccccaacgcggtggaaagcccatgagaggaaggtgagctgtgagggaggagaggtgaggcactagtggcagaaaagaaaaagaaaccacgccacggagaagcgggacctgggtctcccatggaaaaaagtgccttcccatcagtccctgcgctgggccccgtggacccaggcgaccctggttctaggcctgggtgcacctcaggcccgctaggtgtaccccaaagcaggcagaaggcccatgaggagaaggtgaggtttgagggaggagaggtgacgcacctgcggcagaaaaatacaaacgtgccgaggagaagcggggcctggttctcccacagacgaaagtgccttctcatcagcccctgcgctgggcctcctggaccctggcgaccctagttcaaggatcagaagagactccggcacgctagggtaccctaaggaagccagaaagcccatgaggggaaagtgagatttgagggaggagaggtgagtcacctgtggcagaaaaaaaaaaaaaa

SEQ ID NO: 3061 - DNA, 167 bp, Homo sapiens
  source 1..167: mol_type = other DNA
ggtggcacatgcgtataatccgagctacacgggaagctgaggcaggagaatcgcttgaacccgagaggcagaagttgtagtgagccgagatcacaccatcgcactcccacttcagcgacaagagcgaaactccctctggaaaaaaaaaaaaaaaaaaaaaagaaaga

SEQ ID NO: 3062 - DNA, 1654 bp, Homo sapiens
  source 1..1654: mol_type = other DNA
tgttcctcacagaatgagcattgggtgaaaaatgaaatcaagatggaaatgtaaaaaatttattcgaactggatgacacaacctatcaagacctctgggatacagcataggcactgctaagagcaaactttgtagtcctaaaaacctacgtcaaaaagtctgaaagagcacaaatagacaatctaagttcacatctcagggaactagagaagcaggaacaagccaaacccaatcccagcaaacacaggaaataaccaagatcagagcagaactaaatgaaattgacacaacaacaaaaaatacaaaacataaataaaacaaaaagttggttatttgaaaagataaataaaattgatagaccattagcaagattaaccaagaaaagaagagagaaaatccaaataacctcactaagaaatgaaacaggggatattacaactgacaccactgaaataataaagattattcaagggtactatgaacaccttttggcacataaactacaaaacctagaagagttggataaattcctggaaaaatacaactctcctagcttaaatcaggaagaattagataccccaagcagaccaataaagcaagcagcaagactgaaatggtaattttaaaattaccagcaaaaaaagccgaggaccagacagattcacagcagaattctacaagacattcaaagaatgtcttctttcattcaaagaagaaatgataccaaacttttcatactattccacaagacagagaaagaagaaaccctcccttattcattctatgaagccagcatcaccctaataccaaaaccatgaaaggacataaccaaaaaagaaaactacagaccaatatccttgatgaacgcagatgccaaaatccttaacaacatactatctaactgaatccaacaacatatcaaaaaataatccaccatgatcaagtgggtttcataccaatgatatacgagtggtttcacatatgcaagtcaataaatgtgatacaccaaataaacagaattaaaaaaatctaatatgattatatcaacaggtgcagaaaaaacatttgacaaaatctagcattgctttatgattaaagctctcagcaaaataggcatacaagggacataccttaatgtaataaaagccatctatgacaaacccacagccaacataatactgaatggggaaacagtgaaagcattccctttgagaactggaacaagacgaggagcctactctcaccactcctcttcaacatagtactggaagtcgtagccagagcaatcagacaaaagaaggaaatagaggaaatccaaatcggtaaagaggaagtcaaactgtcacttgttgctgatgatatgatcttttgcgtagaaaaccctatggactcctctagaaagctcctagaactgataaaagaattcagcaaagtttccagatacaagattaatggacacaaatcagtagctcttctatacatcaacagctaccaagcagagaatcacatcaagaactcaaccccttttacaatagctgcaaaaaacaacaacaacaacaaaaaacttaggaatatacctagcaaaggaatcaaaagacctctacaatgaaaattacaaaacactactgaaagaaatcatagatggagccaagaa

SEQ ID NO: 3063 - DNA, 395 bp, Homo sapiens
  source 1..395: mol_type = other DNA
aagcaggcggaggaaggtgggataaccttgctagctgaagcttctggctctctttttttcttcttcccgtgcaggaaacttgcttcccttcttcctgcccttggacatgagactccaggttcttatacgtttggactctgggacttgcaccagtggcttccccgaggctctcaggcccccggcctcagactgaagactgcactgcgggctttcctggttttgaggcttttggacttggactgagccactactagcttctctctttccctacctggcagacagcctgttgtgggactgccttctaaccgtgtgaaccaattctctctggtaaactcccttatacatatacgtgtatcttgttggttctgtccctctggagaaacctgactaataca

SEQ ID NO: 3064 - DNA, 472 bp, Homo sapiens
  source 1..472: mol_type = other DNA
aggttgagcatccctaatctgaaaatctgaaatttgaaatgcttcaaaatctgaaactttttgagcactgacatgacaccacatgtggattttgatgtcctagtcaaagtgcaggtgaacaacacacagtttatttgatgttctctaatgaaaaaagaccctctcagcccccttcagctgcagtataacttttctacacatgctcagatttccccatgcaagcacacacacaaagggtcacagaatggcacatgtgcaagctggacaagccaatggcaggatccccacagatgggacctaagtgcatgactcgttgtgtatttttcttattctctgctctgtggtgttagcatactgaaaatgtcaataaggcctgtagatatccctgcgagcagcaatgataaggaaaagtagaaacacttagaacacagaaagtcaagctgttggagaaattggactgtagtgtaaaggt

SEQ ID NO: 3065 - DNA, 296 bp, Homo sapiens
  source 1..296: mol_type = other DNA
ggctgggcgcagtggctcacacctgtaatcccagcattttgggaggcggaggcgggcagatcacttgaggtcagcagttcgagaccagcctggccaacgtggtgaaaccccctctctactaaatatacaaaaattagccaggcacgctggcacctgcctataatccaagctacttgagaggctgaggtaggagaattgcttgaacccggcaggcagaggttgcagtgagccaagattgtgccattggacaccagcctgggcaaagaagcgagactccgactcaaaaaaaaaaaaga

SEQ ID NO: 3066 - DNA, 251 bp, Homo sapiens
  source 1..251: mol_type = other DNA
tgtctctcttttggatatggaaaacttacacaatgcctgtaccatcattgtaccttagacgcagtgaacttgctttttatttcagagactcgtaggcaaaagagaatgtagccttgacccagatgagactttggactttgtaactttgagttaatgctgaaatgagttaagactttgggagactgctggcaaggcatgactgtattttgcaatgtgagaaggacatgagatttgtggggtcagggacagaa

SEQ ID NO: 3067 - DNA, 4177 bp, Homo sapiens
  source 1..4177: mol_type = other DNA
cactcacataggattccagaacactgctacaaggctctgagtgtttgtccctcacataggattccagaacactgatgccattgtctgaatgtttgtcccccacataggattccagaagcctgctgctggggtctgaatgtttgtcccccatctaggattccagaacactgctgcgagggtctgaatgtctgtccctcacatatgattctagaacattgatgctagggtctgtatgtttgcccttaacatatgatttcaaaacactgctcctgaattctgaatgtttgtccttcacataggaatacagaacactgctgctggagtctggaagtttgtcactcacatagaattccagaacactgctgtgaggatctgaatgtttgaccctcacatgggattccagaacactgctgcgagggtctaaatgtctgtccctcacataggtttcccgaacaatgttatgaggttctgaatgtttgtccctaacataggatttcagagcactcctgctgtgctctgaatgtttctccttcacataggattccagaacactgctacgagggtctgaatgcttatccctcatataggattccagaacactcctgctgtgttctgaatgtttgtccctcacataggattccagaacattcatgctggggtctcaatgtttcccttaacataggatttcagaacactcttggggtctgaatgtttgtcactcacataggattacagaacactgctgctggagtctgaatgtttgtcagtcacatagaattccagaacactgctacaagggtgtgaatatttctccctcacctagtattccagaacactgttgcaagggtctgaatgttggcccgtcatataggattccagaacactgctgctgtggtctgaatgtttgtccctcacatagaattccggaacactgctacaagggtctgaatgtttgtccttcacataccattccagaacactgctgccgtggtctgaatgtatgtccctcacataggattccagaacactgccacgtgggtctgaatgtttgccctcacataggattccagaacactactgctggggtctgaatgtttgaccctcacataggattccagaacactcctgctgtggtctgaatgaccctcacataggattccagaacactcctgctgtggtctgaatatttgtccctcacataggactccagaacactgctaagatggtctgaatgtccctcacattgtattccagaacactccttctgtggtctgaatgtttgttcctcacataggattcgagaacactcctgctgtggtctgaatgtttgtcccttacctaggattcgagaacattcacactgggatgtaaatgcttgcccttaacataggatttcagaacactgctcctggggtctgaaagtttgtccctcacataggattccagaactctcctgctgtggtctgaaagtttgtaccgcacataggattccagaacactgctgctgtggtcggaatgtttttctgtcacataggattccagaacactgcagctgggttctgaatgtttgtccctcacataggatttcagaacactgctacgagggtctgattgttggtccctcacataggattcctaaacactgctgctgggctctgaatgtttgtccctcacattggattgcagaacactactgctatggtctgaacgtttgtccgtcacataggattccagaacgctcctgctgtggtctgaatgtttgtctgtcacataggattccagaacactgcggctggggtctgaatgtccctgacataggattccagaacattgctatgaaagtctgaatggttgtctttcacatagcattccagaacactgctacgagggtctgaatgttggtccctcacacaggattccagatccctcctgctggggtctgaatgtttgtccctcacaaaggattccagaacactgctatgagggtctgaatatttgtccctcacataggattccagaacactcctgctgtggtctgaatggttgtccctcacataagattccggaacacttctgctgtggtacgaatgtttgtgtctcacgtaggattccagaacactgctacgagggtctcaatgtttgcccctcacataagattccagaacactgctgctggggtctgaatgcttgtccctcacatacgattacagaacactgttgctggggtgtgaatgtttgtccctcacatgggattccagaccactgctgctggggtctcaatgtctgtccctcaaaaaaggattccagaacactgttacaagggtctgaatttttgttcctcacttaagactgcagaacactgcttcgagggtctaaatgtctgtccttcacataggattccagaacactgctacgagggtctgaatgtttgtccttcacataacatttcagaactgccatggtctgaatggttgtccctcacatagtattccagaacactgctatgagggtctgaatgtttgtacctcacataggattccagaacactgctatgagtgtctgaaagtttgtccctcacataggattccagaagactgctgctggggtctgaatgtctgtccctcacatcggattccagaacactgctgctggggtttgaatgtctgtccctcacatagaatcccagaagactgctgggagggtctgaatgtttgtccctcacataggattccagaacactgctacaaggttctgaatgtttgtccctcacataggattccagaacactgctacgagggtctgaatgtttgtcctttacataggattccagaacactccttctggggtctgaatgtttgtccctcacataggattccagagcactcctgctgtggtctcaatgttttttaatcacataggattccagaacacttctacaagggtctgaatgtttgtccctcacataggattccagaatattcctgctatggtcttaatgcttgtccctcacataggattccagaacattcatgttggggtctgaatgtttgcccttatcataggatttcagaacagtgctcctggggtctgaatgtttgttcttcatataggatttaagaacactcctgctttggtctgaaagtttgtccctcacataggattccagaactctcctgctgtggtctgaaagtttgtccttcacgtaggattccagaacactgctgctgtggtttgaatgtttgtccctcacataagattccagaacactgctacgagggtctgaatgtttgtccctcacataggattcctgagcattgttgccgtggtctgaatgtttgtacctcacataggattccagaacagtgctacgagggtctgaatgtttctccctcacataggattcctgagcattgttgccgtggtctgaatgtttgtacctcacataggattccagaacagtgctacgagggtctgaatgtttctccctcacataggattccagaacacttctgctggtgtctgaatgtttgtacctcacataggattccagaacactgctgctggggtctgaacgtctgtccctcagataggattctagaacactgctgttggggtttgaatgtctgtccctcacatagaattccagaacactgctgcgagtgtctgaatgtttgtcccgcagatgggattctagaacactgctgtgagggtctaaatgtctgtccctgacataacattccagcacactgctacaaggttttgaaatgtttgtccctcacataggattacagagcactcctgctgtggtctgaatgtttgtccctcacataggattccagaacactcctgctgtggtctgaatgtttgcccctcacataggattccagaacattcctgctgtggtctgattgttcctcaaataggattccagaacactgctacgaggttctgaatttttgcccctcacataggattgcagaacactgctacaagggtttgaaagttttcccctcacataggattccacaacactcctgctgtgatctgaatgtttgtccctcacataggattctcgagcactccttctgtggtctgaatgttttttcctcacataggattcctgaagactgctgctgtcactatagtcgttgcgagtgtctgaatgcttgaccttcac

SEQ ID NO: 3068 - DNA, 300 bp, Homo sapiens
  source 1..300: mol_type = other DNA
gctgggtgcagtggctcatgcctgcaatcccagcagtttaggaggccgaggcaggcagatcacctgaggtcacaagttcaagacttgcctggtcaacatggagaaaccctgtctctactaaaaataccaaaaaattaactgggcgtgctggcgcgcacctgtgatcccaggtacttgagaggctgaggttggagaatcgcttgaataaagaaggcgccggttgcagtgagctgagatagtgccactgcactccagcctgggagacagagcaagactccatctcaaaaaaaaaaaaaaaaa

SEQ ID NO: 3069 - DNA, 439 bp, Homo sapiens
  source 1..439: mol_type = other DNA
caaaaaaccccgctacaacccaacaacaaaataaagtgattaaaaaatggacaaacaacatttatccaaagatgcaaagatgatatacaaatagccaacagatacatgagatatatgagaagatgtgtaacatcactagtcattagagaaatgcaaaaagaaaccacaatgggacatcacttcaaacccaatagaaagtaacaagcgcaggtgaaactgaaacccttgaacactgttggtggaaatatgaactggctcctcaaaaaaaaataaaataaaatgaccatatgatccagccatccaactactacagagacagaataactagtagcaggacctcaaacagatatgtgcacacctaagttcacagcagcattacacagccacaaggtggaagaaacaaaaacgtccgtccaggaataggtggataaacaaaagc

SEQ ID NO: 3070 - DNA, 1208 bp, Homo sapiens
  source 1..1208: mol_type = other DNA
gctgcagtggggaggagtggctggggctgtgcactcctcaaagctggtgggagccaggaatgggtgggagacctgccccttctaaattatcaggcaggagccccaccctcccaggcacagctgcagccatccagccatgactgcaaacccgggcatctctgcactctcagaggcccagcaagcccccctgccccgcaggctcagttgtacctggtcctgccacctggcgtctctctgcttccagagcccactccaaattcagatccaagttgaggccaaacctgggcacagtcacaacctggcctggtttgcgcaagctcagggcagtgctgacatgccagccccctgccacctcggccccctccagaatttgggcactggcaagcacaggagggaggctgaggtggggctaagagtggctcagcagtggccggaaggccctcctcagctcgaacgcctgggcactatgggcacagctacccaccgtgcgtctcctctcagctgctgagagctgaacagacgttgggatgacctgcctgcagaaaggagctacccactgcaggtctcctctgagccgtactgtggctcaataaagcacctcttcaccttgctcaccttctacttgtccacatacctcatttttcctggactcaggacaagaactcgggacctgccaactagcagggctgaaagaggtgtaacataaacagggctgaaacgcgctcctttcttgccaaattgcaggcaagaagaagagaagagagaaggagagaagagctgtgtcccttcagggaacacacacctaggagctcctccaaccagggctgtgacaccttctttggggctctgcaggtcctgcatctccaagcttctgggtgccactgcattccctgatacccacagtggaagctgtttgcagtcggcctggtccagctgcagcctcacagggagctggcacctgtgcctggagctgcccaccccactgcagctggcatgcttggctgtgtgcagtggcagatcccatgctcgcttgctcacacacccctcactgctctgtacccagctcgcccttggcaggtgtgggatccagaccactagcatgagctgagtggacagaactaacccagtgggcccgagcaaaacacaggtaaaggtgccaccagccagaggtttcaggcagaaaagtgacacctcaggattctgtaaca

SEQ ID NO: 3071 - DNA, 916 bp, Homo sapiens
  source 1..916: mol_type = other DNA
ttgtgtcctttgatctctctgagcagctggggatcatggtaaattttctctcggatttcagagctccatggatttgtgttttgagctctgagtttctttgagcaaatttctgttccaaactgctatccagccatgactggctggatgttttagaagttatgacagaaaacggaccgggtccaggatcagatttgatccagtagttaattggcttgaatccagttccagttagaggcctcctacatctgactgggtcagaaggaaagtggtagtaaatgataatattggaagattgtaacatttggcttttgaaaattcacagggatttttgtgttctacccctttgtttcatttttctcgcacggttaggcaggaaaaaaaaatcattggctaagttaatgaagggaacctgggagtaaagccaatattttaggtaaaaataggatccttaatttctggaaaactaagctccttctggctaatacattaggcctgggaagcagcaaagtcttacagaaatggcaaaatcttattaagataacttacagtggaacattccaaatgaataatgccctgaagtgcatttaaaaatgagggttcccaaattagtctcatctagggatgcctattaatatgcagaagcttctaaaaagatttagagatggcaccgcccatctgggagcaagtttgagtcttaccagtttgatactgggtgctgagcaaagtggcacgtgtctatgttttgtcacatgtattttgctctgggcagaatgaaaaatgttaatttggttactccaagcaaccccttgggcagcatcttgcaaagctgagaggattcttcctgtgattccatgattttccattgtgatgcagcttggcccccagagctataatgtggtgaggagggtgacagagc

SEQ ID NO: 3072 - DNA, 952 bp, Homo sapiens
  source 1..952: mol_type = other DNA
ccaaaagtttaataagaagaccaactggtttataaaactgctaacccaagtaaaacaaaaactgaatatcaaggaaatattttccagatttgcatgctaaatcaccaatattgaaattgtttagatatataatttaaataaactccatggtctaagccaaattacctataactcatcagttaccagtgccatgcacctaatttgaagaaacagctggtattcaagaggatgtaagtctaatgttaattaagcacggacttatgaataaccaggatggccacctttccgtcttaagtccttaaaacttttgttattaaaagttctgcattccataactcatcatggaaagagaaaatgatccaaattaaatatattgctgtggtgatctctaaattgctaaaatagtttataatcaatgtttggtatgtcgaacctatattcctaggaaaacaatcaaaacttcaggtgcatttggttacctgatgggccatttaaacattttataaagggatttcattcagttgtcattttcagtgcatgttttctgattgtaaaaaagctcttccatgcaagagggttgatgttaaaacagtagattattatgctgaagtgtattttcaccagataaagaaagccttttatggttcacagaggacagccaaccccttcacaatctagaatctgatgactggatcttctgagaacatcagaggactgcccttgccattcacatgacagcaaaactttaaaaccttaaactttgggttcatagtcttacaactcagaagggtccctccacacttggaaccatacaccccttggaacccttaaggtaaagctaacaaggacagttcccccccagaagaagatggcatccttaatgtgaacagcttttcccaagatcacagatcaagacttctctactatcatgagactcttatcttaagtatct

SEQ ID NO: 3073 - DNA, 398 bp, Homo sapiens
  source 1..398: mol_type = other DNA
gttaaagtgaactaagtatgtcctgagaaggactccataattatatatatgagtccttgtgggtgacctgcaacctatcttaataggtaaacaagaatgaaaacctaacttgagtgtatgcacctcaaacaacagctacatcttggccaatcccaatggccaaacttcaaccactcaggcactgccaaatgttcaaactgtgctcaaacaaggcaaacgctgagttgtttctgtacctcacttccgatttcggtatgccacttcccttttgtctacaaatcttcttccaccacatgactgtgctggagtctctgtgaatctgctgtgattctggggactttccgattcatgaatcgtttattgctcaattaaactcctttaaagtttttcttttaaca

SEQ ID NO: 3074 - DNA, 378 bp, Homo sapiens
  source 1..378: mol_type = other DNA
aaactgggagaggcagcgaaagcacttcacgcctcagatcaccagaagatgctcccaccagcaccatgacagtttgccagtgccatggcaacacaggaagtccccaccccttgccatggaaacagctggaagttactgcccatttctagctatttctgagtaacccgccccttaattagcatgtcattaaaagtgaattataaaaatgactacaagccacccctaggctgctactctgggagcacaacccacagagggctccctgccctgcaggagcggacgcagggctgtaacaccgccaatgcctccatagagctgctttattccaccacaggcttgcttttggattccttcctgagcgacgccaagaacctgccc

SEQ ID NO: 3075 - DNA, 288 bp, Homo sapiens
  source 1..288: mol_type = other DNA
ccaggcactgtggctcacgtctgtaatccctgcactttgggaggccaaggcgggtggctcacccgaggtcaggagctcaagaccagcctgatcaacatggtgaaacctcatctctactaaaaaatacaaaaaattagccaggtgtggtggtgggttcctgtaatcccagctactcgggaggctgaggcaggagaattacttgaacctggggggcggagattgcagtgagctgagatcacaccactgcactccagcctgggcaacaagagcgaaaatccatcttaaaaa

SEQ ID NO: 3076 - DNA, 475 bp, Homo sapiens
  source 1..475: mol_type = other DNA
tcttttataaatacaaataatttaaaaagtattgataaaataaaaatagaaaatagaaatctcttcagacttgtcagcatacatttttgactgtgttttatatttacatttgctagatattttaaggtgctagggtttggcatgaaggttataaagctataaacacaggaaaaaagaatatttgtttatgtgattttttaaatacataagaccaatttaatatggtttgttgaacaaaaataatggaattttctgagttattggtaaaatacccatgtatttaactttgaagtcctcacttacgtgaacacctgatattcacaggctataacatggttaacaagaaaataacctagaaatgatgactagctttgtctaatacctcagttctcacaaatactctagataaactgtcaaaaataagtaaatgtaaatggataaatgtctatacaagacatcttaatgtatttttgaa

SEQ ID NO: 3077 - DNA, 103 bp, Homo sapiens
  source 1..103: mol_type = other DNA
gtcccatggtgtttctgtctttctggggacctgagattcagtgtaggagtgaagtccatgattttaaagccttcatgtctctgctttttaactctgcctgctt

SEQ ID NO: 3078 - DNA, 456 bp, Homo sapiens
  source 1..456: mol_type = other DNA
tgttgggaacaagcctccccaaatccggccataaactggccccaaaactggccataaacaaaatctctgcagcactgtgacatgttcatgatggccataacacccaggctggaaggttgtgggtttactggaatgagaacaaggaatacctggcccgtccagggtggaaaaccacttaaaggcattcttaagccacaaacgatagcatgagtgatctgtgccttaagaataagggatactttaagttaatctaatatctatagaaacaatgctaatgactggcttgctgttaataaatacgtgggtaaatctctgttcagggctctgctctgaaggctgtaagacccgcccccccccccccgatttcccacttcacacctctatatttctgtgtgtgtgtctttaattcctctagtgctgctgggttagggtctctccaacagacctggtctcagc

SEQ ID NO: 3079 - DNA, 1683 bp, Homo sapiens
  source 1..1683: mol_type = other DNA
tacaaagatggggaatgaaaattagtacttagaatttgttatcactctttagtacagtaaagcagttttgcccatggtttccagaacaaaggactatgaagttggatgaatgggagagaattggaagagattttttaaaagacatataaagatggagcagaaattctagtttctgtatggtcagtgtgggcactaataaaggcagcccttgagccatttcaaacagatgatgaggcagactcagatgaggaagaggaggatgagtgtaaaaaactaacttcaaattctgagtgtggggagcagctaccagacgagattaaagaaaagaaagaaaaacttttaaaagtatgttttactagcccgttggctccacctgctgaattaagtgaatggccacctcctctctctcctctaaatgggtgagaaaataaattagctgaaaaacttactgctcctgtagttacaacattaaaacctggagcaattggtggtggtagacaaaattctattcaaaaagctaaagccaagggagaccttgaagcatggcaatttcccgttactataatccagcaagtaggacagaatatagctaattaggctgctttctcttttaagttactaaagaatttaagcaagccattagtcaatatggactgaactctctttttgtgcaaactttatttaaaaatatggctcttgataatagattactaccatataattaggatactttgacaaaacctgttctcactccatctcagtacttgcagtttaaaacttggtaggctgatgaagctcaaactcaggcaaaagaaaacacacaagtgcagccacctgtgcctgttttctttgatcagttaatatgagttggccctaactggggttgattagagaatcaagcactaatggaagatgttgccattgttcagctgtgcttcatgtgcttacatacatagaaaaggataaatgttaccggggaaaagtatccttatttcagttctgtctgacaaggacctaaagaaccatatattaattttattgctcagctccaagaggctgtgtataaagccgcaaatgatcaaaacagctcaggatgttgtaatacagcttcttgcgtacaataatgctaatgcagagtgtcaaactgctattagatcccagacagagagggcccatttaactaaatatattaaggcttgcgatggcattggagataacttacataaggttattcttttagctcaggctgtggctagattaagagtaagaaaaaatatgcttcatttctcaggctcttgacttaattgtgggcaaattggacacaagaaaggaatgtagaaaggaattcaaaagacgaaaactactaccatcaatcaacagaaaagtcccaacgtacgtccctggtgtaagaaaggcaatcactgggcaagtccgtgtcattctaaatttagcaaagatggacaacctctttcaggaaataggaagagggacccgcctcaagcccctcaacaaactgaggcatacccagcacagccactgcccttacatatgtacagcaattgtcccccgcctcagcaagcagtgctgctgtagacctctacagcacaattcccatctccttacttcctggggagccaccaaagaaggtccccacaggagttagggcacccttacactgaggaa

SEQ ID NO: 3080 - DNA, 100 bp, Homo sapiens
  source 1..100: mol_type = other DNA
ttcctggcgcccaacatggggtgacaaagacccggtgaaggaaggctggagcatgtgaaagcagaggacacaacatcaaaagacacccgaggacatacaa

SEQ ID NO: 3081 - DNA, 295 bp, Homo sapiens
  source 1..295: mol_type = other DNA
ggccgggaacagtggctcacgcctgtaattccaacactttgggaggctgaggcgggtggatcgcctgagcccaggagttcaagaccagcctgggcaacatagtgaaaccccgtctttacaaaaatacaaaaaattagctggccatggtggcccagctactcaggaggctgagatgggaggattatttgaggccaggaggtggaggttgcagtgagtcaagatcacaccactacactccagcctgggcaacagagcgaaaccctatgccccccaaagaagaaaaaaaaaaaaaaga

SEQ ID NO: 3082 - DNA, 133 bp, Homo sapiens
  source 1..133: mol_type = other DNA
ggccccgtagcagtgtggacagagcacgggttttgagtgcagcctggcccgagccaccttcccggcaagtgacgacctccttgggctgcggcttcctcccctgcaaagtagtcagagaaacactcacctcaca

SEQ ID NO: 3083 - DNA, 323 bp, Homo sapiens
  source 1..323: mol_type = other DNA
ggccaggcgcggcggctcacggctgtaatcccagcacgttgggaggctgaaggcgggtggatcacctgaagtcaggagtttgagaccagcctggtcaacatgatgaaaccccgtctctactaaaaatacaaaaattagctgggcgtggtgtgcgcgcctgcagtcccagctacttgggaggctgaggcaggagaatcgcttgaactcaggaggcggagactgcaggaaggcgagattgcgccactgcactccagcctgggtgatgcagcgagacaccgtctcaaaaaaacaaaacaaaacaaacaaaacaaaacaaaaaaaaa

SEQ ID NO: 3084 - DNA, 448 bp, Homo sapiens
  source 1..448: mol_type = other DNA
gtctgggccggcgcctcgctgtgccgcgctgtgcgcctctccgcgcctgcgccgccgctgtgcccctctccgcgcctgcgccgccgctgtgcgcctctccgcgcctgcgccgccgctgtgcgcctctccgccgctgtccgcctctccgccgcgccgccgctgtccgcctctccgccgctgtccgcctctccgccgctgtccgcctctccgccacgccggcgctgtgtgcctttgcgagggcggagctgagttctcctttgcacagacttcggagatacagcgaaggcagagcaatgttctcctcagcacagacccgggcgggcgggccggtggcaccgcgagggcggagctgcgttctgctctgcacagaccttgggggcactgcctcgctttgggacacctcggggccgcatcgacggtgaataaaatccttcctgtttgcagccct

SEQ ID NO: 3085 - DNA, 291 bp, Homo sapiens
  source 1..291: mol_type = other DNA
ggccaggcacggtggctcatgcctgtaatcccagcagtttgagaggccaaggtgggcggatcacaaggtcaagagatcaagaccaaacacggtgaaaccccgttgccacaaggaaaaaaaaaaattagccgggcatggtgtcacatgcctgtagtcccagctactagggaggctgaggcaggagaatcacttcaaccgggaggcagaggttgcagtgagccaagatcgcgccactgcactgcatcctgggcgacagagcgagactcctgctcaaaaaaaaaaaaaaaaaaa

SEQ ID NO: 3086 - DNA, 114 bp, Homo sapiens
  source 1..114: mol_type = other DNA
ggccgggcactgtggctcacgcctgtcatcccagcactttgggaggctgaagtgagtggatcacttgaggttgggagtttgagaccagccaggtcaacatgatgaaaccccatc

SEQ ID NO: 3087 - DNA, 313 bp, Homo sapiens
  source 1..313: mol_type = other DNA
agagcttcactttgcacttttgctcttaggacactctctcttggaatccagctcccatggtgggagaaggccaagtcacatgagggaaaacttacatgctcgggtgacaagcagctcaagctaccagacatgcagttgaaccccttggaggctcagagatgatttggctcttttcaacaccatgctgagcagaagaatctccaagctgcactcagtcaaaccacagaatcatgtgagataatagtaaatatttgttattttaagccactgaatttcagggatggtttgttacacaacaatagttaactaaaac

SEQ ID NO: 3088 - DNA, 205 bp, Homo sapiens
  source 1..205: mol_type = other DNA
atgaaaagaaggctgcgaagctgaaggaaaaatacgaaaaggatattgctgcatatcgagctaaaggaaagcctgatgcagcaaaaaagggagttgtcaaggctgaaaaaagcaagaaaaagaaggaagaggaggaagatgaggaagatgaagaggatgaggaggaggaagatgaagaagatgaagatgaagaagatgatgaata

SEQ ID NO: 3089 - DNA, 2587 bp, Homo sapiens
  source 1..2587: mol_type = other DNA
aaaacctacgggatgcagcaaaagcagtattaaatttatagctataagtgcctacctcaaaaaggaagaaaaacttcaaataaacaatctaatgatgcatcttaaaggactagaaagcaagagcaaaccaaacccaaaatcagtagaggaaaaaaattaagatcagagcagaaataaaattaatttgaaattaagaaaacacaaaagataaatgaaataaaagttggttgtttgaaaagttaaacaaaattgacaaacctttagccatactaagaaaaaaagagagcagatacaaattaataaaatcagaaatgaaaaatgagacattgcaactgataactgatactgcagaaatccaaaggaccattagtggctactatgagcaactatacaccaattaagttggaaaatctagatgaaatggacaaattcctagacacatacaacctgccaagattgaaccatgaagaaatccaaaacctgaacagactgacaacaagcaatgagattaaagctgtaataaagtttcccagtaaagaaaagtccaggacctgatggcttcattgatgaattctaacatttaaagaggaactaataccaatcctactcaaactgttccaagaaacagagaagagaatacttccaaattcattctatgaggccagtattaccctgatacgaaaaccaaagacacatcaaactacaggccgatatccctgatgaatatttataccaaaatcctcaacaaaatactagcaaaccaaattcaacaatatattagaaagattattcatcatgacctagtgggatttatcatagagatggcaaggatggttcaataaatacaaatcaatcaatgtgatacttcatatcaacagaatgaaggccatttcaattgatgctgaaaaagcatttgataaagttcaacatctcttcataaaaacgctcaaaaaaacgggatatagaaggaatatacctcaacataataaaagccatatacaagagacccacagctagtatcatacttaaatgaggaaaatctgaaagcctttcctctagtatctggaacacgacaagaatgcccacttttaccactgttattcaacatagtactggaggtcctagctacagcagtcagacaacagaaagaaatttaggacatccaaactaaaatggaagaaatcaaatcatccttgtttgcagatgacatgatattatacttggaaaaatctaaagactccatcaaaaaaaaaccactagaactgataaagtccacaaagttgcaggatacaaaatcaacatacaaaaatcagcagcatttctatatgccaacagttaataatctaaaaaagaaataagaaaggaatctcatttacaatagccatacataaaattaaatgcctaggaattaaccaaagaagtggaatacctctataatgaaaactataaaacactcatgaaagaaactgaggaggacaccaagaactggaaaaatcttccacattcatggattggaagaatcaatgtttttaaaatgtccatactacccaaagcaatctatagattcaatgcaatccatatcaaaacaccaatgacattcttcaaggaaatagaaaaaacaatcctaaaatttacatgaaaccacaaaagacccagaatagccaaagctatcctaaggaaaaataagaaaactggaataatttgaatcattacctgatttcaaattacactacaaagctatagtaaccaaagcagcatgtaatggtataaaaacagacacacagaccaatggaacagaatagagaacccagaaacaaatccacacaccaacagtgaactcatttttgacaaaggtgccaagaacatacactgagaaaagacagtctcttcaataaatggtgctgggaaaactggatatccatatgcagaagaatgaaactagacccctatcccttgtcgtatctaaaaatcacatcaaaattgattaaagactttaaatctatgacttcaaactatgaaagtactataagaaaacattggagaaaatctccaggatattggtctgggcaaaaatttcttgagcaataccccatgagcacaggcaacaaaagcaaaaatggacaagtgggatcatatcaagttaaaaggtttttgaacagcaaaggataccatcaacaaagtgaagagacaacccacagaatgggagaaaatatttgcgaactacccatatgacaagggattaataaccagaatatataaggcactcaaacaatctacaggaaaaaagtctaataatctgatttaaaaatgggcaaaagatttgaatagacatttctcaaaagaagacacataaatggcaaacaggcataagatctgatcaccacagaaatgcaaaccaaaactacaatgagatatcatctcactccagctaaagtggcttatatccaaaggacaggcaataacaaatgctggcaaggatgtggagaaaagggaaccctagcacactgttggtgggagtgtaaattagtacaaccactatggagaagggttcggaggttaatcaaaaaaaactaaaaatagagctacc

SEQ ID NO: 3090 - DNA, 304 bp, Homo sapiens
  source 1..304: mol_type = other DNA
gctgggtgcagtggctcacgcctgtaactccagcactttgggaggccaaggctggcggatcatgaggtcaggagttcgagaccagcctggtcaacatggcgaaatgccatctctactaaaaatacaaaaattagccgggcatggtggcggacgcctgtaatcccagctacttgggaggctgaggcaagagaatagcttgaacccggaaggcagagattgcagcgagccaagattgtgccattgcactctggcttgggcgacaagagcaagactccatctcggaaaaaaaaaaaaaaaaaaaaaa

SEQ ID NO: 3091 - DNA, 304 bp, Homo sapiens
  source 1..304: mol_type = other DNA
ctgggcacagtggctcacacctgtaatcccagcactttgggaggctgaggtgggtggatgacaaggtcaggagttcaagaccagcttggccaacatagtgaaaccccgtctctgctgaaaatacaaaaattagccgggcatggtggcgcgtgcctgtaatcccagctacttggtaggccgaggcaggagaatcgcttaaacccgtgaggtggaggttgcagtgagcagagatcacgcaactgcactccagcttgggcaacagagtgagacttaatcttgaaaaataaataaatgaaaaataaaa

SEQ ID NO: 3092 - DNA, 293 bp, Homo sapiens
  source 1..293: mol_type = other DNA
gggcaggcatggtggctcacgcctgtaatcccagcactttgggaggccgaggtgggcggatcacctgaggtcgggaatccaagaccagcctgaccaacatggagataccctgtctctaccaaaaatacaaaattagctgggtgtggtggcgcatgcctgtaatcccagctacttgggaggctgaggcaggagaatcacttggacccgggaggcagaggttgcagtgaggtgagatcgcgccattgcactccagcctgggtgacaagagcaaaattccatctcaaaaaaaaaaa

SEQ ID NO: 3093 - DNA, 100 bp, Homo sapiens
  source 1..100: mol_type = other DNA
cttgagccccctggacctcactttcttcaatctatgaaacggggcagtgcaccaccaggccctgcctaccttactgggaagccgggagggcagaatggaa

SEQ ID NO: 3094 - DNA, 220 bp, Homo sapiens
  source 1..220: mol_type = other DNA
caagcttgtccaacccgtggcctgcaggctgcacgcagcccaggatggctttgaatgaggcccaaacacaaattcttcaactttattaaaacattatgagatttttgcacaaaccattgttttttgttttagctcatcagctatggttactgtattttatgtgtggcccaagacaattcttccaacatggcccagggaagccaaaggattggatacccct

SEQ ID NO: 3095 - DNA, 1074 bp, Homo sapiens
  source 1..1074: mol_type = other DNA
tgttgcgggaagtcagggaccccaaacggagggactggctgaagccatggcagaagaacgtggattgtgaagatttcatggacatttattagttccccaaattaatacttttataatttcctatgcctgtctttaccgcaatctctaaacacaaattgtgaagatttcatggacactgatcacttccccaatcaatacccttgtgatttcttatgcctgtctttactttaatctcctaatcctgtcagctgaggaggatgtatgtcacctcaggaccatgtgataattgcgttaactgcacaaattgtagagcatgtgtgtttgaacaatatgaaatctgggcaccttgaaaaaagaacaggataacagcaattgttcagggaataagagagataaccttaaactctgaccaacagtgagcctggtggaacagagtcatatttctcttctttcaaaagcaaatgggagaaatatcgctgaattctttttctcagcaaggaacatccctgagaaagagaatgcacccctgagggtgggtctataaatggcctccttgggtgtggccatcttctatggtcgagactgtagggatgaaataaaccccagtctcccatagcgctcccaggcttattaggaagaggaaattcccgcctaataaattttggtcagaccggttgctctcaaaaccctgtctcctgataagatgttatcaatgacaatggtgcccgaaacctcattagcaattttaatttctccccggtcctgtgttcctgtgatctcgccctgcctccacttgccttgtgatattctattaccttgtgaagtaggtgatctttgtgacccacacccacaccctattcatacactccctccccttttgaaagtccctaataaaaacttgctggttttgcggcttgtgaggcatcacggaacctaccgatgtgtgatgtctcccctggacacctagctttaaaatttctctcttttgtactctgtgcctttatttctcaaaccggccaacacttagggaaaatagaaaagaacctacgtgaccatcggggcaggttccccgat

SEQ ID NO: 3096 - DNA, 307 bp, Homo sapiens
  source 1..307: mol_type = other DNA
gccaggcgcggtggctcacgcctgtaatcccagcactttgggaggccgaggtgggcagatcacgaggtcaggagatggagaccatcgtggctaacacagtgaaaccccgtctccagtgaaaatacaaaaaaattagccgggcgtggtggcaggtgcctgtagtcccagctactcgggagactgaggccggagaatggtgtgaacccgggaggcggagtttgcagtgagccgagattgagccactgcactccatcctgggcgatagagcgagactccatctcaaaaaaaaaaaaaaaaaaaaaaaaaa

SEQ ID NO: 3097 - DNA, 485 bp, Homo sapiens
  source 1..485: mol_type = other DNA
tgttaagtacattgagttctgagatcctctccaaagaaccaatgtatcagtatgttcagctcacctgttctttgttcttcattttaacttttaatttcctcattctttatgtctccttgcccctagtttcagtaaacaatcccctcctagcctctgtcacctgctctgacctgagtcacctttagtcacctggtccgtaaccatctttcctgtctaaacttctcaccccaccactctggcttatacccctgctctctttaaaatagccagtcagaattagcttagattgtgcggtccaaccctagcccataggggaacaacacagcagtagggggtacctgcatcagggataagaacccattcccctcccttgttccggtgtgctctcgccattgcaccatccatgagacgcactcttgtatagaagtaaaattgccttgctgagaaaatgtatgtttgagtgctatttcttttgtggcactgaa

SEQ ID NO: 3098 - DNA, 460 bp, Homo sapiens
  source 1..460: mol_type = other DNA
tgtggtaggccagtagtggcctcccaagatgcccatgtcctaatcccaggaacctgtcaaaattaccttgtatggccaaaggggctttgcagatgtaatgaagttaaggatctttcgccaggaagattatcccagcttgttcaggagggcttgatgtcctcacccgggtctgtataacagaagagcaggtgacgggagaggaggttggaggtgtagcgatggagcaggaaactggagttgaggagggcagctcaagccacagagtccaggccacctcagagccaggaaatgcatcctcccacagagccctggaaggccccagccctgctcccacctggactggctcagtgaggctaattttataattctggctgattttagaactctaagggaataaatttgtgttgttttaagtcactaagtgtgtggtaatttattgcagcagcaaccagaaactagt

SEQ ID NO: 3099 - DNA, 74 bp, Homo sapiens
  source 1..74: mol_type = other DNA
gcagaaagagccaggagaaagctgatggagccaggacagagatctggttccagctttcagccactagcttcctg

SEQ ID NO: 3100 - DNA, 568 bp, Homo sapiens
  source 1..568: mol_type = other DNA
taatatctttaatatataccgagctcatacaaatttatctgaccccagaagatagagcaaaggacactgacaatccacaaaggaggaaatacaatcgctccacatgaaagatgttcaaccgtgctagaagtcagtgaaatgccaactgaaacacgatgctattttttcattatcaaattagcaaatatttagccagatgataattcccaatacgggcaagatggacatgtttatccttgctggtggcagtgtaaggggatacaaatatttccggaaaccattttgtcaatatgtagtaaaagcctcaaaggttttcatattctttagttgaagaatcccacctcctggagtctaccctaataacttgacattgggaaacagcctgtgcacaaagatattcatcaatttataactgaaaagttagtaacagcattagtgattggcaactggcacaatggtccatctagtcaatgggagagtacacagccactccaaaataaaatatttagtaatcataaggggagatgcccacgatatgctaagtgaaaacagctgcacaaaactgtat

SEQ ID NO: 3101 - DNA, 289 bp, Homo sapiens
  source 1..289: mol_type = other DNA
gccgggcgcggtggctcatgcctgtaatcccagcactttgggaggccgaggcgggcggatcacgaggtgaggagatcgagaccatcctgggcaacatggtgaaaccccgtctctactaaaaatacaaaaattagctgggcgtggtgatgccagccactcgggaggctgaggcaggagaatcgtttgaaccagggagtcagaggttgcagcgagccgagactgcgccactgcactccagcctggcgacagagcgagactccgtctcagaacgaacaaagaaacaaacaaa

SEQ ID NO: 3102 - DNA, 446 bp, Homo sapiens
  source 1..446: mol_type = other DNA
tatttatgcctgattcatggctgaaatttcaggatgaaagctatgaaatctctatttgtgtttgtgtatctattaatgtatgttatgtatatgtgatattttcttaactccagagagcattgcaaaattcatttatgaaatcctctaaaagtgctctattctaacttggcttggaaaaaaataagcatttataaataaatattcaccaaactcctagaaatataggaactgatcaaatgtttcttaagttaacatgatttggataaaacttagttaaataagattaatatagtatttttggtgtaataaaacaactatatcttcaaaattatcattattgaatataaaacaagcataaattcctattctgcttgagttctagtcaaataagctaatattatacttactagaaacgtaaaatcttaaagcttatagatttgattcta

SEQ ID NO: 3103 - DNA, 549 bp, Homo sapiens
  source 1..549: mol_type = other DNA
gtgcagaaaaaagtgttaatgaagccgacctgactacttaaccttagagacctgctttacaaggttggcccttgattggcatctgggaacttggagttcagggggcttccaccattcccagaactgatcaaagtagcttactatatctaaactgtaaaacaatatagtttctcctgaacacctgctttccttctgggagtctggaattttggtatgtgccaggcagagactacctttgtgaccagctcccagtaaaaaccccaggcactcagtctctaacaagcttttctggttgacagtgtttcacaagtgctgttacaactggttgctgggagaattaagctcatcctctgtgattccactggcggaggattcttggaagcttgcacttagtttcccctgacttcaccccatgtgtcttttttcctttgctgattttgttttgtatcctttcactgtaataaatcatggccgtgagcagaactgtatgtggagtcttatgagtcttcctagcaaatcttcaaatttgggggtggtggtgagggcctc

SEQ ID NO: 3104 - DNA, 109 bp, Homo sapiens
  source 1..109: mol_type = other DNA
aagatgcagatcaccatagtcctgacctcacaaggttgtttaggggagcaaacgaaacgacaaatataaagttctcagcacaaagccccatacacaggagacgctcagt

SEQ ID NO: 3105 - DNA, 64 bp, Homo sapiens
  source 1..64: mol_type = other DNA
aggcctgccagttaaagcccactcttctatcatcacccagctgcatgaccctgagcaagtcact

SEQ ID NO: 3106 - DNA, 291 bp, Homo sapiens
  source 1..291: mol_type = other DNA
gactttatccatgccaatagttgctgtccccttccaggggtcaccttgagaggcatgacagctgttccacaggggctatcccttctcagaaaacttctcttctgagcctctttaacagctttctccagaaccagtgtctgaaccaccctggaaattctgccttattatttcttactcaaacatgtttagagtggatagaaaattatgcagcttgcacacccatcgtctttaaccccaaatttcctttggctattaaaaaagtggtggcaaaagacatcctcaaaagaaaga

SEQ ID NO: 3107 - DNA, 160 bp, Homo sapiens
  source 1..160: mol_type = other DNA
ggatctgtactctaactttctcacataactagctatgtgaccttgggtacctctctcaccttgctgaacctcaatttgctcctctgcaaactagagttagaaaattaccctcctgtggggtgttgtggggcttaaatgagataaacctagtacagccctc

SEQ ID NO: 3108 - DNA, 292 bp, Homo sapiens
  source 1..292: mol_type = other DNA
gccgggcatggtagctcaagcctataatcccagcatgttgagaggctgaggtgggcagatcatttgaggccaggagttcaagaccagtctggccaatatggagaaaccttgtctctactaaaaacacaaaaattatctgggcatggtggggcatgcctgtagtcccacttacttgggaggccgaggcacgagaattgcttgaacccgggaggtggaggttgccgtgagccaagatcacgccactgcactccagcctgggcaacagagcaagactctgtctcaaaaaaaaaaa

SEQ ID NO: 3109 - DNA, 94 bp, Homo sapiens
  source 1..94: mol_type = other DNA
aggggacgctttgaaggaaccaagtgcatttttatctgtgagttctgttgtgtttgtcaaaaagtcattgtaatctttcatagccatacctggt

SEQ ID NO: 3110 - DNA, 2690 bp, Homo sapiens
  source 1..2690: mol_type = other DNA
tcaggtgagtgatcacagtacctagttttagcatcatatcaaggaaggagacactgaagatggtaggaaagacagccttgaattgcctacaccacccttccccccttccccagccatgcagagagaatcgctgtgcttgggggagggagagcaaagtgattgtgcaactttgcattggaattcagtgttgctctgtcacagtggaaagcaacacagggcagaattcagctgatgcccacagagggagcatttagaccagcccttgccagaggggaatcttccatcctatcagttggaacatgagttccagctagccccaccactgagggctaaagtgctctggagttctaaatgaacttgaaaggccacaaggcctgcaattcctgtgcaagtcctagtgctgcactgggcttggagccactggacttggggtgcacacgacctagtgaaatactagctggggtggccaaaggagtgcttgcatcaccactcctccaactccagacatcacagcttgcagctccagcagaagagggaaaagtaaagaggatttttttcttgcaacttggatcccagctcagctacagtaaaataaagcccccattctagaccatagcttctggatgacatttctagacccaccctaggccagaagggaacccactgccctaaagagaagggtacactcctagcagaattcaccacctgctgaccaaagagccattgggttttgaataaacatcagcagtagccaggcagtagttgccatgggccctgggcaagaaccaaaactgtgctcatttcaggtgtgacccagcacaattctcatctgtggtggccatcaggagagactcctgcttgagaaaaggagagggaagaataaagaggactttgttttataactcaggtaccagctcagccacaataaaataaagcaccaagtagactcctaaagattccaggctttggctcctggagtgcatttctagaccccccactgggccagaatggaacccacgaccctgaagggagagacccagtcctggcaggattcatcatctgctgactaaagagcccctgggcttgaataaacatcagtgatagtcaggagatagttgccacaggccttgggcgaaacccaatactgtgctggcttcaggtgtgtcccagcagtctcagtgggtttatccaaaggagcattgcgtgactccatccccaactccgggcagctcagcatgaagaaagagactccatttgcttgggggaaaataagggaagagaacaagagactctgcttgatacattagggaattctggatcttactcaagaccgctaaagtggtacctctgcaaaagacacagcattactggacttgggagtgccccctaatgcacatatggttgcagtgaccaaagacttaagattacaacacttaattcttgttgaatacttagaaagccttctcaagaaggatgggtacaaacaagccagacaaaacaaactggaataaatttctaacttttcggtgcacagacattgacaaacatccacaagcatcagggccatccaggaaaacatgacctcactgaatgaactaaataagacaccagtgaccaattccagagtggcagagatatgtgacttttgagacagagaattcaaaatagctgttttgaggaagcttaacaaaatccaagataacacagagaaaaaattcagaatcctatcgataaatttaatgaagagattaaaataattaaaaagaatcaagcagaaattctggagctgaaaaattcaatagacaaactaaagaatgcatcagtctctcaacagtagaatggatcaaggagaagaaagaatgagcgagcttgaagacaggctatatgaaaatactcagaggaggcaaaagaaaaaaaatatgaagcatgcccacaggatttagaaaatagcttcaaaaggggaaatctaagagttattggtcttaaagaggaagtggagagagagattgaggtagaaagtttattcaaagagataatattggagaactttccaaacctagagaaagatatcagtattcaagtccaaggaggttatagacgatcaagaaaaattaactcaaagaagactatctcaagacatgtaataatcacactcccaaaggtcaaggataaaaaaggatcctaagagcagcaaggaaaagaaaaaaaatgagatataaagcatttccaatatgtttggccacagatttctcagtggaaaccttacagaccaggagagagtcagatgacatatttaaaatgctgaaagaaaaagacttttatcctagaatattatatccagtgaaaatacacttcaaatatcaagaggaaaaaaagactttcccagacaaacaaaagatgaggttttttgtcaacaccagacctgtcctacagaaatgctgaagggagttcttcaacttgaaagaaaaagatgttaacaagtaataagaaattgtctgaaggtacgtggtaacagtaaatacatagacaaatacagaatattttaacactgtaattctagtgtgtaagatactcatgtcttgaataggaagactaaaagacaaatctatcaaaaataataactacaacattttaagacatagtgtaataagatataagtagaaacatcagaaggttaaaaagcaggggat

SEQ ID NO: 3111 - DNA, 1039 bp, Homo sapiens
  source 1..1039: mol_type = other DNA
tgagaggtgaaaccagctggacttcctgggttgagtggggacttgggagaacttttctgtctagctagaggattgtaaatgcaccagtcagcactctgtagaaacgcaccaatcagcgctgtgtgtctagctaaaggattgtaaatgcaccaatcagcactctgtaaaaacacaccaatcagcactctgtgtctagctagaggactgtaaacgcaccaatcagcactctgtaaaaacacaccaatcagcgctctgtgtctagctagaggattgtaaacacaccaatcagcactctgtaaaaactcaccagtcagcactgtgtctagctggaggattgtaaacgcaccaatcagcactctgtaaaaacataccaatcagcgctctatgtctagctaaaggattgtaaatgcaccagtcagaactctgtaaaaaggcatcagtcagcgctctgtgtctagctaaaggtttgtaaacgcaccaatcaacactctgtaaaactgaccaatcagcaccctgtaagatggaccaatcagtaggacgtgggtggggacaaatcagggaataaaaactggccaccccagccagcagcagcaacccacttgggtccccttccacgctgtggaagctttgttcttttgttcttcacaataaatcttgctgctgctcactctttgggtccacaccacctttaagagctgtaacatgcgaacgtccgtggcttcattcttaaagtcagcgagactatgaacccaccaaactccagacacatctgaaggaacaaactccagacacatcatctttaagagctgtaacactcactgcgaaggtctgcagcttcattcttgaagtcagcaagaccaagaacccaccggaaggaaccccacgaacccactggaaggaagaaactccagacacatctgaaggaacaaactctggacacatcatctttaagagctgtaacactcactgcgaaggtccgcggcttcattcttgaagtcagcaagaccaagaacgcactgaaggaaccaactccagacac

SEQ ID NO: 3112 - DNA, 39 bp, Homo sapiens
  source 1..39: mol_type = other DNA
gcctcctcaaatcctttttggaataaggctgggaataaa

SEQ ID NO: 3113 - DNA, 60 bp, Homo sapiens
  source 1..60: mol_type = other DNA
aggcgatgtggtatcatggcaagaatattggaccagaagtcaggaaagactgtgttacga

SEQ ID NO: 3114 - DNA, 198 bp, Homo sapiens
  source 1..198: mol_type = other DNA
agacaggactcgtggagtaatgggaggagcactggactgggagtcaggagacttgagctaccgtactagctgtgcctctaacttgctgtgtggccttgggcacctcacttcacctctctgggcttcagtttcctcatctgtaaaataaagggcttggattagaaggccttaaaggttccttccaactttaaatttcta

SEQ ID NO: 3115 - DNA, 142 bp, Homo sapiens
  source 1..142: mol_type = other DNA
ccagccacgtttgtaatctgttgtgtgaccttgggcaagtcatgaaacttctctcgagtctcatttttctcatatataatgtgggagtgttagattagatggtttttaagattctttccagtaataacatttgatgattcta

SEQ ID NO: 3116 - DNA, 58 bp, Homo sapiens
  source 1..58: mol_type = other DNA
catctgtttaatgggctaattatgtttaccacatgcctacttcacaggaataccatga

SEQ ID NO: 3117 - DNA, 144 bp, Homo sapiens
  source 1..144: mol_type = other DNA
ccccagacacagtttgtgctttcctatcccttgctttgactctttctgtttcccttgcctaaaacctatctctccaatttctaattgttggaattttcccacattccaaagtccatctcaaacactgcctgcttcaggtaactt

SEQ ID NO: 3118 - DNA, 59 bp, Homo sapiens
  source 1..59: mol_type = other DNA
cccagcgtttagcacaataccttggagttaggaaatgctcaaaaatacttcctgaataa

SEQ ID NO: 3119 - DNA, 165 bp, Homo sapiens
  source 1..165: mol_type = other DNA
caaagactatgcccaatgatactggacaaagaattattgaaaagaataaaagtcagaatgcaaccaaaatgtccaaaaataggtgattgtttaaattgtattttatgctggtatatccttagaatagaataccatgtaggattaaaaatgtttatcttgaaagaa

SEQ ID NO: 3120 - DNA, 368 bp, Homo sapiens
  source 1..368: mol_type = other DNA
aagttacaaatcagtggcctatgagctgcatctagctagcagatagaattttttaaaatgtatgtttggtccacagaatatttaaaataatttgagccaacctttaaggttaaagagatttcacaccaaaaaaaaactagatttttttttttttttttttttttttgcttctcttgaaaaattggagatctgacaacattagatctgcatccacatgtggcaccaatatctggaactgagtagcagctgctcacttcagacaaaccatgttctctccagtttgacaaagtccctatcaccccatattttatgccacacctacttcactcatttgctcttccaccctggctccttgaggcatttgactt

SEQ ID NO: 3121 - DNA, 298 bp, Homo sapiens
  source 1..298: mol_type = other DNA
gggtgggcacagtggctcatgcctgtaattccagcactttgggaggccaaggcaggcggatcgcaagatcaggagattgagaccatcctggctaacacggtgaaaccccatctctactaaaaatacaaaaaaattagctaggcatggtggcgggcacctgtagtcccagctgctcaggaggctgaggcaggagaatggcatgaacccaggaggtggagcttgcagtgagctgagatcgcgccactgcactccaacctgggccacagagcaaggctccatctcaaaaaaataaaaaaga

SEQ ID NO: 3122 - DNA, 686 bp, Homo sapiens
  source 1..686: mol_type = other DNA
aagcatacctctttctattgcactttactttattgcactttccagacattacattttttgcaaattgaaagtttgtggcaaccctgtattgagtctgttggcaccattttttccaacagcatgtgctcacttcatgtctctgtgtcacattttggtggttcttggcaatattttaaactttttaatcattattatatttgtttgagtgatttgtgattagtgatctttgatgtttctattctgattgttttgaggtgccacaaaccacacccatataagatgacaaatttaatcaataaatgttttatatgttctgactgccttaccaactagctgttccttcatctctctccctctcctgggacttccctgttccctgagacataattttgaaataaggccagttaataacccggcaatgacctctaagtgttcaagtgaaaggaacagtcacgttatctctcactttaaataaaaagctaaaaatgattaagcttagtgaggaaggcccagaaaggctgaaagctaagccccttgcactaaacagtaatgaagttgtaaatgcaaagaaaatgttctttaaggaaattaaaagtgctactctagtgaaaacactaatgaaaagaaggcaaagcaaccttattgttgatatggagaaagttttagtggtgcagataaaagatcaa

SEQ ID NO: 3123 - DNA, 310 bp, Homo sapiens
  source 1..310: mol_type = other DNA
ggccaggcgcagtggctcacacctgtaatcccagcactttgggaggccaaggtgggtggatcaccagaggtcgagagatcgagaccagcctgaccaacgtggacaaaccctgtctctactaaaaatacaaaattagccatgtgtggtggcgcatgcctgtaatcccagctactcaggaggctgaggcaagagaatcgcttaaaccccagaggcagagattgcggtgagccgagatcacgccattgcactccagcctgggccacaagagcgacactccgtctcaaaaaaaaaaaaaaaaagaaaagaaaaa

SEQ ID NO: 3124 - DNA, 262 bp, Homo sapiens
  source 1..262: mol_type = other DNA
ttgggaggccgaggtgggcggatcacaaggtcaggagatcgagaccatcttggccaacatagtgaaaccccgtctctactaaaatacaaaaaattagcccggtgtagtgacatgtgcctgtaatcccagctacatgggaggctgaggcaggggaatcacttgaacccgggcggcggaggttgcagtgagctgagatcgcaccactgcactccagcctggtgacagagcaagactctatctcaaaaaaaaaaaaaaaaaaaga

SEQ ID NO: 3125 - DNA, 318 bp, Homo sapiens
  source 1..318: mol_type = other DNA
ggccagatgcagtggctcacacctataatcccagcagtttgaaaggccaaggcaggaggatcccttgagcccaggagtttgagaccagtctgggtaacatagcaagatctcatctctactaaaatttttaaaaagtagccaggcatgatggcacatgcctgtagtcccagctaccgaggaggctgagatgggaggatcccttatcccttgagcccaggagtttgagcttgcattgagctatgattgcaccactatactccaacctgggcaacagagcaagactgtgtctcaaaaaacaaaccaaaaaaaaaaaaaaaa

SEQ ID NO: 3126 - DNA, 307 bp, Homo sapiens
  source 1..307: mol_type = other DNA
gccggacacagtggctcatgcctgtaatcccagcactttgggaggccgaggcgggcggatcacctgaggtcaggagttcgagaccagcctgataaacatgaagaaaccccctctctactaaaaatacaacattagccgggcatggtggcgcatgcgtgtaatcctagctgctcgggaggctgaggcaggagaatcgctagaacctaggaggtggagattgcagtgagccaaagtcgtgccattgcactccagcctgtgcaacaagagcaaaactccatctcaaaaaaaaagaaaagaaaagaaaaaa

SEQ ID NO: 3127 - DNA, 699 bp, Homo sapiens
  source 1..699: mol_type = other DNA
tgtgccagttaccaatgtattacctcccattgcctccttccaaatgtagttctccttgcctgctctgcaaaaatgtatctggattctttaaatattttttctttgctagctggtttgagggtgctttgtcagtagagaaggtagggagacgttgcagaaagaagaaattttccttcctggttgtcatgcactactttggcagcctcctgcaatgtgcacggtttctccagagcctggcttctacaacataagcaacctttacagcatgtagctcctgcagcaaatgcagctaacctggtacccagcagctgaagcacaggtagcttctccagtacgtggcaggtagcagctacccctagcacccaccatacacacacacgtacacacacatgtgtacacacacattgggcaatttatagcagagtgcctcagatgagatacatccctgtaaatagctttcattagcaccctagagtgcaggtgctactgatgcagctccccagcaacttctctgccatccaatgagttatggctgtgtgttgtccaacaaggtctggatcctggtccaggggtccaggagatttttgtcttgagtcctacaatgtctagatctcagtccagggatggaggagactcttccttggatatgctatcttagccctgcaaataatggctgttccttacatttgttattcttct

SEQ ID NO: 3128 - DNA, 2644 bp, Homo sapiens
  source 1..2644: mol_type = other DNA
ggaaaacagaagaataacaatgacaaaaacccaaaagaaaaaaatcaaaagcatataatgaaataaatggtagacctaaacttaattgtagcaataattccattcactgtaaatggtataaatactacaattaaaagagagagtattaggctgaataaaaaggcaagagtcaacatatgctgtctacaggaatacactttaaatgtaataacatggatatcttgagagtgaaaagatagaaagatatatacaatgcaaacaataagcatgagaaagctaggttggaatattaatattacaaagaatagactttatgccaaggagtactattagagataaggagggatatttcctaatcatatgtgtgaaattatcatgaatgcataagtcataaacatgtagacacaaactgacagaaaactagagagaaatagtaaaatctacaataacaattggagattttaacattcttgttctagaacttgatagaacaaataggcagaaaatcagtaagaatacacaagaaattaaaaacaccatcaactgccttgacctgtttgatgtttacagaacactattcccacttggagaatgtgttctattcccacctggagaatatgtgttctttaaaacatatttaaaacatacaggaatagagtcctgtatgtatgttctactttatttattaaagtagaccctaatctggttcatcaaatgagtttcaaacattttcaaaagattgagatactacaaaatatgcttcttgtttataattaattaaattagaaataaaaaaagaaaacaataaaatatctagaaaagaccagttggaaactacacaacaaacttaatacctcatggttgaaagtcatgaaattttaaaataattaaattaagttatgcagtatattgaaatttatgaaactgattaaatgaaaatacaatatattgacatttataatatgagccagagagaagcttagcagaaattttgagcttttaatcctaaattagaaggaagaagaaaggtttaagatcaatagcgtaggtttccactttaagaaagtgggaaagtataatcattttaaacccaaaagcagtaaaaaaagaaaacaaataacaaaggcagaaaactgtgaaataaaaacaaactacaaagaagattaatgaaagcaaaacatgaatatttgaaaagattaacagaatttataagctataacagaaaagttcaagaaaaaagagatgatacaaattatgaatatcagtaatgagagattatcattacatatcataacaatattaaaggataacaagggaatattatgaaaacttcatgtcaataatttcaacaactttgataaaataggtaaatttatttaaaaacatattaacaaaactggcatagtaaaccaaagaaatcaaaatattcctttattgattaaagaaattgaatttgtcgtcaaaagcattcctaaaaaaagaacttcaggtttagatagtttccctggagaattctatataacatttaaggaggaaataatattaatcctacacggactctttcagaaaacataggaggtaaaaacaaaacacttcctgatttatgagacaggcataatcccaacagcaaaacctgacagatattacaggaaaataaaagtataggccaatattcctcatggttctaggcacaataatctttaacaaaatattagcaaacaaacttcaacaataaaaagtaaaaagtataatacctcatgatcaagtaggatttatctcagaaaagcaactttagtttaacgtttgaaaataaatcactgtaaatgcatcctaataaagaagaaaaatatgatctcaatagatgcagaaaaagcaattgaaaaaatttgacagtcattcacagtgaaaactctcagaaaattagaacagattgaaacttcctcaatctgatgaagggcctctatgaaaacatataattaataccgtccttaatgataaaatctgaatgctttcctcctgggatatagtagaaggcaaagatatatattcttactacttctgttcagcgttgttctaaagatcctagccagagcaataagacgagtaaaataaattaaaggtataagcataggaaaggaagaagtaacattgtgtttattcacaaataccatgattgtttacattagaaactcttaggggatatacaaaacaactaatagagctaacagtgcatttaggaaggtcacaagatcaatatacaaaaattgattgcatttatgtagtaccggcaaataatttgaaaatgaagttttaaaatcaatttacagtagcctataaatataagacatttaaataaaagtttaacaaaagaatgtaagattccccactcaaaattttaaaaggccttagagaaaaatccgttatttatagatgaatactcagtatttctaaagtgtcatttttccccaaattatctgtagattcaatgcaatcaccatcaaaatatcaacatcttgtttttctaacattaagataaattgtcaaatttattttaaaatgtatatgagattgcagaaaacttagaaaaagaataaagttgaaagactcacattacctaatttcaagactttctgtaaatatatag

SEQ ID NO: 3129 - DNA, 1182 bp, Homo sapiens
  source 1..1182: mol_type = other DNA
aatgagggaacagatgagaaaataagcagagaaatgaaaattttcaaaaataagtaaaaagttaaggtataatacctgaaatttttttgaagagtcattgaagtggcttaacaatagattgtagatggcagaagaaagtgtcagtaaacttgaatacaggtcaatagaaattattaatgtaaagaacagagagaaaaaggattcaaaaatgtgcagagtgatctgtacaacaatatcaaccagtccactatactttgcatgtctcagaagaagaaaaaagaaatgaaattactaaaaagaaccaaaggttaaagtacagaatctgaaataaaaaatgatttgttggagaatcttaacagcagattgtgggtggcagatgagaaaatgggacagaaatgatatttgaggaaatcatagctgaaaatgtccaaaatttgctgagaaaaaacacaaaaatatgcaaagaaaatcacatgtaggcactgtattcaaacttctgtacaccaaagatacaaagaaaaatctcaaaggcagccctaagggtggaaacaatagatcacctacaggggaataatcaaacatcgactcattcctcatactaaatgtaatgccatttcttaatgattgaaaagaaaaacaactgcaaaaccagaattttatgtagagcaatgtgatcttgcaataatgaagaaatgaattttctgttgtcagtggaattcctataagtagtgtgaaaggcagtgagtgcttcagggtgaagggaaatgacactatgaaccaagatagaaacttgtttttacagaaaattttcactaaaaattttaaagtatctatttacatgtaaaagaatatccttttattcttttaatttctttaaaagaaaaactgactaatgcataaattatagtattttctcatgagtctatagtacttgcagatatgaagtatgtaaaaatactacaaagtactgggtggcagtaaatgaaattatacttataagatactcacatttgcataaagtggtaaaatattaactctgtgtaaacagtgataattaaagaggcatattgtaatccttagaacaactgctaaaaaataacaaaaaaggtacagctaaaaagccagttgtgcaattgaatggaaaaataattgatcagtttaactcattaaaaaaggaaagga

SEQ ID NO: 3130 - DNA, 452 bp, Homo sapiens
  source 1..452: mol_type = other DNA
caattaaaaacttaaaaaaaaaacaccacaattatttgaaggcaccggagagtgaccaaaagcagttggaatctggagtgaactgtcccgggtaaaattcacgtttgttacagcttcttccctcaaggaacttcccagtctgtatggtatagagaagttagaattcaggcagaaaaccacaatcttattggtttgtgatgttagcgaatggagctggcattggcaaagtagctgaaattgaggaaggaagtattagaaaggatggagccatcgagggaaggctcccatgaatctacatataagttaccctaacattctggctgatataaactgtgcatgtatgtgggagcctataagtgcctggagaaaagcaacaactagaaagctaaaagagctgaacagatacattagatgaagaggagacaaagttaggagtttgagtttacaaagtt

SEQ ID NO: 3131 - DNA, 282 bp, Homo sapiens
  source 1..282: mol_type = other DNA
gaatattatatatttattttaaatgtttataaggtctatgtaattacatatttcttaggttaaattttgaaagcaggacacaaaattatatagaaagtatgataacatcatgttttaaaaatatatcctcggggaaaatgagagtaaggaaatatatcaaatggttattaatgattggatttaaattatagaaataattactttaatttttcttcattttactcctatgtgtttttctaaattatttttaatgagcatgtatcattttaaaatgaaaataaa

SEQ ID NO: 3132 - DNA, 68 bp, Homo sapiens
  source 1..68: mol_type = other DNA
tgtgtgtttgcagtttctctgtttcagtaaatgaaaagctccttggggaaggagaacatatcttttcc

SEQ ID NO: 3133 - DNA, 93 bp, Homo sapiens
  source 1..93: mol_type = other DNA
gaaagatatttgacttctttgcacctcaatattttggactgccatttagagataatgagagttacttaccagacagcaatgtcatgaggaata

SEQ ID NO: 3134 - DNA, 379 bp, Homo sapiens
  source 1..379: mol_type = other DNA
gttatgggctgattgtgtcccctaaaatacatagggtgaagccctaagctcctaccaactgtatttggagataaggcctttgaagaagtaattaaggtttaatgaggtcataaggttggcactctaatccactaggactggcgtccttataaggacaggaagagacatcagaggttctcttgagctcacaaagaaaaggctgtgtaaggacacagcagcagaaggctatctgcagccaaagacagaggcctcaggaaaaaccaaacctgatgacacctcagtattggacttctagcctccagagttgtgagaaaccaatttctgtttgctagtccacccaccttgtggtattttgttatggtaggcctacagactgata

SEQ ID NO: 3135 - DNA, 152 bp, Homo sapiens
  source 1..152: mol_type = other DNA
tcaaataccaaatgtatggattgctatttaaataaccttgcacaaaccacttaacctctttgggtttccattttctcacttttataaaataagagggttgaatcggatgatctctgataacctttttatagtaagagccctatgattttatg

SEQ ID NO: 3136 - DNA, 506 bp, Homo sapiens
  source 1..506: mol_type = other DNA
caccaacctcctactcctaaaatagtccttttttttttctgcaaatggcaccacccaggtactcgagaaaaacatcttgagagtcatcctaaacttctctttttctttaacagcatccaacttccaccccttcaccgatacagtacccaaatcttatcaattctacttcctaaaaatcccttgaatccattcctcttaggttcctcatagcttcacagtcactgtttcagttcatgccctcactatacttcaccctgatttccattaattgtcttctaacagtctcacagactctggtctgctttcttcataccccttcttccacactcaattgctgaagtgctttttctcaatagaactaagaagtcatttcctcacttaaaacccttcagaggatcccacctcatttctgacttcttagtatagcatatataaggcacttcatgataggcacctacttatccctccatcttcatctcctgtggctcttcaccttgcatgttatg

SEQ ID NO: 3137 - DNA, 1199 bp, Homo sapiens
  source 1..1199: mol_type = other DNA
tctagtgcctgctgtgtctacctttccctgttagagatgagttccttctagtcttagttgagccttctgcttgtgctcttgctcctccccccgtgttttccccagagccccagtccctcatgccctgctctttcttgagatttcatcttcttgtgctgcactggctcctttccttatagtttatgaatatgcttttgcctcatctatcttaaaagattctctcctgactctatgtccccatctctatagttctctgtctcactctccctttagaacaaagttccaagtactctccaccctcattttctcctcttcttcactccccattcactattccatctagtttaatttggctttgattttcataatttcactgaaaaacatattctgaaagggtgtcacatccagtgacccttcattttacatcttatttgatgtctctttggcattttgtgttgttgtcaatccctgttcctgaaactgtccccttactgggtctgcatgatattaatagctctccttattctccctctcagataagaccctgctcagtctccttataggcttctcttgctctcttcacccacctccccaaatctatgatctcctggatcataatcttcattcattccactcttctcgtttgactcactaatcctaggtgatctcatcaggtcatccacatccaaatctttagccacctgtgtgatttccagatctgtagatcagatgtctgtttttagcttctgatccatagttatcttggtctaagtgcttcatttcagagacaagtttgttaggtacaaaacccaactcagtgtcttctgttgtgtatcacacttgatcttcctcactacaattattgctctgatactgtccatccagcctcagagctctaggaacctgagagtaatcctgaatgtattttatttcaactcccatatccagtttctaaatcctttgattccttgattcttgtttaaaagattgaataaatcctctgcttttctaccctgtttatataaataacctggcacagacttttcatgactactcatctggacaaaagcagtaactttctatgtggagttctaccaccacattgttctttagtttaccttgcaaataacaccacagctatctttacaaaatgcaaatcgggttttgttattttctttgttaaaatataaactcttcag

SEQ ID NO: 3138 - DNA, 301 bp, Homo sapiens
  source 1..301: mol_type = other DNA
ttcaggccttggtgccttcgcttgtactccactctctgcccatgttacccttccctctcagcctgaaatattcccactttccctgcaagagttagctctttgaagccattcttaaccttcctaattaagttttcttctaccttctttttgcccatgctgtattttgtactatctctattatcacttattgcactatttgacatttattttttcacattctggtgtctaccctgtgagcttcttggggaaaaggatgaaaacataattcttgttttatctctaccataatacttggtacata

SEQ ID NO: 3139 - DNA, 1057 bp, Homo sapiens
  source 1..1057: mol_type = other DNA
atcttgcattacctctctgggacatttgacatcatgaaacataccttgcctcttgaatctctttattttcttggctttcataacacttgatactgctggcttttcccacctacacctttggttgcacttttttcccatgcttggcttctcttttctaccaacctctgaaaagttggtgttattcagcgttttgtccttatacttgcatgttcttactcaacacaagttctgtgaataatctaatttgtgcccataagtctcacttggactagtgaatctcaaattctccaggctctccatccaaacctacttccttggctctagagctttatatcttactgtctactggaaatattttgctgacccgcaggaaccccaatctcaacaggtcttaaaagtaagtcaccatgtcttgctcccaaatctcttcccctttcttatccagtcatgtaattcagaaacagaacccttatatcttctttttttcattggatgctactgttctttctctggtttctataagtaaaaaccaaataaataaaaaaccttttcattccttcctttctttcctcctctcaaaaatatgtcattcatgcaagatgagggcatagtaaaaatataaataaacaaaagaaagaaatatgtcttgactctatccactccatctccagtcagctctaacccagccatttttcatggagactaatgcaatactctacccctataatcaacttcttctaccctcaaccctttacaatctttccctcagcagccagagtgctattttgaaaagcgtctataagattgtgtatctcccctatttaaaaatctttgatagcatcccattccacgtagaatcaaaaccaaacttaatacaaggcctaagaaatcctacattatccaggctttgcctccttttctagtttctgcttaacaaccatgcgcctcttggtcaccaagtctgttggcctctttttagtttttaaaacacataaaacatgttcacacttcaaggcctttgcatgtgttgctccctgtgcacagaatactctttctc

SEQ ID NO: 3140 - DNA, 129 bp, Homo sapiens
  source 1..129: mol_type = other DNA
ggccaggtgtggtagctctcacctgtaatcccagcactttggaaggccaaggcaggaggattgcttgagcccaggagctcgagaccagtctgggcaacatagtaaaacctcattgaaaaaaaaaaaaga

SEQ ID NO: 3141 - DNA, 121 bp, Homo sapiens
  source 1..121: mol_type = other DNA
gggggtttcagaggagacaggagggagcggactagacagatctctgggccaccaaactctgcttcagccgcaagaacatctttttatctgttttacattcttggattctgagaaatatttc

SEQ ID NO: 3142 - DNA, 182 bp, Homo sapiens
  source 1..182: mol_type = other DNA
ggttttggggtcaaaagatctgagtttgaatcctggctcattcactgcttaaatgtatgacctgggataaattacttaatttctctaaatttcagttttcttatcacccatattagaatcctattacctattgtgcagaatttttttgaggatgaaagaaaatagtatttgtaaaatgcctg

SEQ ID NO: 3143 - DNA, 98 bp, Homo sapiens
  source 1..98: mol_type = other DNA
agagcaaggattttgcttttttttttttttttctcagtacctagaagaatgcctggcacagtgcaggtgtccagtaacaacttattgaacaaataaat

SEQ ID NO: 3144 - DNA, 1418 bp, Homo sapiens
  source 1..1418: mol_type = other DNA
gtcatggccctcaggcaagcggactttggaggctctggaaaagggaaagactgggcaaattgaatgcctaatagggcttgctttcagtgcagtctacaaggacactttaaaaaaaagattgtctgaatagaaataagccgcccactcatccatgcctcttatgtcaagggaatcactggaaggcccactgccccaggggatgaagttcctctgagtcagaagccactaaccagatgatccagcaacaggactgagggtgcccggggcaagcgccagcccatgccatcaccctcacagagccccaggtatgcttgaccattgagggccaggaggttaactgtctcctggacagtggcgctgccttctcagtcttactcttctgtgccagacaactgtcctcctgatctgtcactatctgaggggtcctaggacaggcagtcactagatacttctcccaggcactaagttgtgactggggaactttactcttttcacgtgcttttctaattatgcctgaaagccccactcctttgttagggagagacatcctagcaaaagcaggggccattatacacctgaatataggagaaggaacacacatttcttgtcccctacttgaggaaggaattaatcctgacaattaattcctgacaacagaaggacaatatggatgagcgaagaatgcccattcccttcaagttaaactaaaagattcaccttctttccctaccaaaggcagtacccccttagacctgaggcccaacaagtacttcaaaagattaaggacctaaaagcccaaggcctagtaaaatcatgcaatagtgcaatagtccctacaatacttcaattttaggagtacagaaacccaatggagagtggagattagtgcaagatctcaggattatcaatgaggctgctgtccctgtataaccagctgcacctaacccttatgctctgctttcccaaataccagaagaagcagaatggtttacagtcctggaccttaaggatgactttttctgcatcccttacatcctgactctcaattcttctttgcctttgaagatccttcgaacccaacgtctcaactcacctggactgttttaccccaaggtttcaggccatctatttggccaagcattagcccaagacttgagccagttctcatacttggacactctcgtcctttggtatgtgaatgatttacttttagcctcctgttcagaaactttgtgccatcaagccacccaagcgctcttaaacttcctcaccacttgtggctacaaggtttccaaaccaaaggctcagctctgctcacagcagtttaaatacttagggctaaaattatccaaaggaaccagggccctcagtgaggaatgtaaccagcctatactggcttatcctcatcccacaacgct

SEQ ID NO: 3145 - DNA, 173 bp, Homo sapiens
  source 1..173: mol_type = other DNA
gtagaaggtgtattgaattgggagtcaggagaattgggttctaaccccaagttcagccacaaataaagctgtgagacattggcaagtcatttaactttcctgagtcttggttttctcatcctgaaagtgagggattcggctgacgtctctaaaatctctttcaactctaacct

SEQ ID NO: 3146 - DNA, 665 bp, Homo sapiens
  source 1..665: mol_type = other DNA
tgagaggtgaagccagctgagcttctgggtcgggtggggacttggagaacttttgtgtctagctaaaggattgtaaacgcaccaatcagcgctctgtgtctagctaaaggattgtaaatgcaccaattagcactctgtaaaaatgcaccaataagcactctgtctagctaaaggactgtaaatgcaccaatcagcactctgtaaaatggacccatcagtaggacgtgggcggggccaaataagggaataaaagctggccaccccagccagcagtggcaacccactagggtccccttctacctgtggaagctttgttcttttgctcttcacaataaatcttgcttactctttgggtccgtactagctttaagaggtgtaacactcactgcgaaggtctgtggcttcactcctgaagtcagcaagaccacgaaaccaccgggaggaacaaacaactccagatgcgccaccattaagaactgtaacactcactgcgaaggtctgcaacttcactcctgaagtctgtgagaccacgaacccaccaggaggaacaaacaactctggacacaccatctttaagagctgtaacactcaccgtgagggtccgtggcttcattcttgaagtcagagggaccaagaacccaccagaaggaaccaatgctggacac

SEQ ID NO: 3147 - DNA, 2183 bp, Homo sapiens
  source 1..2183: mol_type = other DNA
aatatttattataatatcttccatttagtttctacttcagtttatttggatcttttttcttcttttcttggttaatctcactaatggtctatcaattttgtttatctcttaaaaatagtttttttgttttatttatttatttagatttatacaaaaggtcattcaaggctactatgaacacctttatgcacacaaactagaaaatctaaaggatagataaattcctggaaatatacagccctcctagattaactcaggaagaaatagaaactctgaacagacaaataacaagtagtgagactgaaacactaataaaaaaaattgccaacaaccagaaaagtccaggaccagagagattcacacctgaaatttctatcagtcattcaaagaagaattaatactaatttcattgaaactattccaaaagatagagaaagagggaatcctccgtaaataactctaagaagccagtatcaccctaatactaaaaccaggaaaggacataacaaagaaaaaaaaaaagaaaactacagatcagtatcgctgatgaacatagacgtaaaaattagcaacaaaatactactgaatccaacagcatatcaaaaagataatacaccatgatcaagtgggtttcatatgagggatgcagggatggattaacatatgcaagtcaataaatgtgatacatcacataaacagaattaaaaacaaaaaccgtatgatcatctcagtagacacagaaaaagcatttgacaaaatccagcatttatgatggaaaccctcagcaaaattgccatagaaaggacatagctcaaggtaataatagttatctatgacaaacccacagccaacattatactgaatggagaaaagttgaaagaaatccccctgagaactggaataagataaggatgcccactttcaccacttctattcaacatagtactggaagtcctaggcagcacaatcagacaagagaaagaaataaagggcacccaaattggtaaagaggaagtcaaactggagctgttcactgatgatataatcatatacctagaaaaccctacagactcatccaaaatcctcctagatctgataaatgaattcagtaaagtctcaggatacaaaaatcaatgtatacaaatcggtaccactgctatacatcaacaacgaccaagctgagaattaaatcaaaatgcaaaatcaatcttttttagaaaagctgcaaaaaaataaataaattgcttagaaatgtacctaatcaagaaggtgaaagatctgtacaagaaaaactacaaaacattgccaaaagaaatcatttataacacaaacaaatggaaatatatcccatgttcattgttgggtagaatcaatattgtgaaaatgaccatactgccaaaagcaatccacagattaagtgcaattcctatcaaaataccatcataattactcacaaaactaggaaaaacaatcctaaaattcatatggaaccaaaaaacagctcacataaccaaagcaagacttagcaaaaaaaaaaaaaaaaaaaaaaaaaaaatctggaagcattacattgtccaaattcaaactatactacaaggctatagttaccaaaacagcatggtactagtattaaaacaggcatatagaccaagggaacaaaatggaaaacccaagataatatttacagtcaaataaagccagatacttacagccaactgacatttgacaaagcaaacaaaaatataatgtaggaaaggagatcctgttcaacaaatggtgctggtataattggcaagccacatgatgaataagaaactggatactaatttcttaccttatacaaaaatcaactcaagatgatcaaagacttaaatctaagacctgaatccataaaatctccagaagataacatcagaaaaactcttctagacattggcttaggcaaagagttcataaccaacactacaaaggcaaatgcaacaaaaacaaaaataaatagatgggacccaattaaactaaaaagcttctgcccagcaaaagaaataattagcagagtaaacagccaacccacagtatgggagaaaatattcacaaactatgcatctgacaaaggactaatatccagcatctataaggaactcaaacaaatcagcaagaaaaaaaatagtcccatcagaagtggg

SEQ ID NO: 3148 - DNA, 688 bp, Homo sapiens
  source 1..688: mol_type = other DNA
atacatctagcctagacctatatcttgagtttaaggcccatatatctaactctttgaaggaaatctctatttataattcccaaaataaacgattttaatatgcagaaaatttgaattgatcatgtttcccattcatatccatttttactcctgattttttttttctttgtgaatagcacccccattcaggcaagccagaagtgtgggtgtcatcccagactcttcctatttatttgctccccatacccagcttgattctaagctgtgacttaaatatctcttgaactgtttttatttcttgatttttttttccaacttggtattatgtctcatttagagtactgcaggagcctcttaactggtcaccctacctcctctctaacattccctcagtttatttcccatagtgctgtcaaattattgttctatagcacaaatttgcaacctctatttctgtgtaaatgccatcaatagtttcccattgtctcttaatgttaacattgccacttttgtgccaacatcaagaatactctgtggttctgcccttgcctatctctgaagactcatctcttgcctgttctcctttctgcaggccccagtgtaaggagccatatcgtgttaatcatctgtgttttccactaggcactgtcctctcatgtgttctgccctcccctctgtatggctcttt

SEQ ID NO: 3149 - DNA, 129 bp, Homo sapiens
  source 1..129: mol_type = other DNA
gcagtggaaatgagaacccaggacatgggacgagacagacctatgtgtggatctcagctctgccatttgctagctgtgtggccctgacagtcacctgccttgtgagctctgagttccttaagtgtaaaa

SEQ ID NO: 3150 - DNA, 333 bp, Homo sapiens
  source 1..333: mol_type = other DNA
ccagcctcaggggctcacacctgtaatcccagcactttgggaggccaaggcaggcaggttgctgaagcccaggagttcgagaccaccctggtcagtgtgatgaaactccgtctctaaaaaaaaaaaaaaaaaaaaaaaaaaaaattagccaaaaaaaaaaaaaaagccagatgtggtggtgcaggcctgtggttgcagctacccaggaggctaagatgggaggatcacctgagcctgggaaggtcgaggctgcagtgagctatgattgtgccactgcacacatactgggcaacagagtgagactcttgtctcaaaaaaaaagaaaaagaaaaa

SEQ ID NO: 3151 - DNA, 3151 bp, Homo sapiens
  source 1..3151: mol_type = other DNA
tttggtgccatgactcggatcgggggacctcccttgggagatcaatcccctgttctcctgctctttgctccgtgagaaagatccacctatgacctcaggtcctcagaccgaccagcccaagaaatatctcaccaatttcaaatctggtaagcggcctctttttacactcttctccaacctccctcactatccctcaacctctttctcctttcaatcttggcgccacacttcaatctctcccttctcttaatttcaattcctttcattttctggtagagacaaaggagacacgttttatccgtggacccaaaactccggcgccggtcacagactgggaaggcagccttcccttggtgtttaatcaatgcagggaagcctctctgattattcacccatgtttcaagggtgtcagaccacgcagggatgcctgccttggtccttcacccttagcggcaagacctgcttttctggggaaggggcaagtactccaaccccttctctccttgtctctaccccttctctgcttttctggggaaagggcaagtaccccaaccccttctctccttgtctctaccccttctctgcttttctggggaaagggcaagtaccccaaccccttctctccttgtctctaccccttctctgcttttctgggggaggagcaagtacccctcaaccccttctccttcacccttagcagcaagtcccacttttctagggggcaagaacccccaattccttatttccacaccccgacctcttatctctgtgccccaatcccttatttcctcacccctacctcttatctctgtgccccaatcctttatttccacaccccgacctcttatctctgtgccccaatcccttatttccgcaccccatcctcttatctctgtgccccaatcccttatttccatgccccgaccccccttcccgcttttctggagggtaagaacccccgaaccccttccctccgtgtctctatgctctcttttctctaggtttgcctccttcactatgggcaaccttccaccctccattcctcctccttctccctcagcctgtgttctcaagaacttaaaacctcttcaactcacacctgacctaaaacccaaatgccttattttcttctgcaatgctgcttgaccccaatacaaactagacagtagttccaaatagccagaaaacggcactttcaatttttccatcctacaagatctaaatatttcttgttgtaaaatgagcaaatggtctgaggtgcctgacgtccaggcattcttttacacatcagtcccttcctagtctctgtgcccagtgcaactcgtcccaaatcttccttctttccctcccgcctgtcgcctcagtcccaaccccaagcgttgctgagtctttctaatcttccttttctacagacctatctgacctctcccctcctcgccaggccaagctaggtcccaattcttcctcagcctctgctcctccaccctataatctttttattgcctcccctcctcacacctggtccggcttacagtttcgttcggtgactagccctcccccacctgcccagcaatttactcttaaaaaggtggctggagccaaaggcatagtcaaggttaatgctcctttttgtttatcccaaatcagatagtgtttaggctctttttcatcaaatataaaaacccagcccagttcatgactcgtttggcagcaaccctgagatgctttacagccctagaccctaaaaggtcaaaaggccgtcttattctcaatatacattttattacccaatctgctcccgacattaaataaaactccaaaaattggaatctggccctcaaaccccacaacaggacttaattaacctcaccttcaaggtgtacaataacagaaaaaagttgcaattccttgcctccactgtgagacaaaccccagccacatctccagcacacaagaacttccaaatgcctgaaccgcagcggccaggcgttcctccagaacctcctcccccaggagcttgctacaagtgccagaaatctgaccaccaggccaaggaatgcctgcagcccaggatttctcctaagccacgtcccatctctgcgggaccccactagaaatcggactgttcaactcacctggcagccactcccatagcttctggaactctggcccaaggctctctgactccttcccagatcttcttggcttagcggctgaagactgatgctgcctaattgcctcggaaacaccgtagaccatcacggacgccgagcttcaggtaactctcacagtggaaggtaagtccttccccttcttaatcaatatggaggctacccactccacattaccttcttgtcaagggcctgtttcccttgcttccataactgttgtgggtattgacggccaggcttctaaacctcttaaaactccccaactgtggagccaacttagacagtactcttttaagcactcctttttagttatccccacctgcccagttcccttattaggccgagatactttaactaaattatctgcttccctgactattcctggattacagctgcatctcattgctgcccttcttcccaatccaaagcctcctttgcatcctcctcttgtattcccccaccttaatccataagtataagatatctctactccctccttggcgaccgatcatgcaccccttaccatctcattaaaacctaatcacccttaccccgctcaatgccaatatcccatcccacagcatgctttgaaaggattaaagcctgttatcactcgcctgctacagcatggccttttaaagcctataaactctccttacaattcccccattttacctgtcctaaaaccagacaagccatacaagttagttcaggatctatgccttatcaaccaaattgttttgcctatccaccccatggtgccaaacccatatactctcctatcctcaatacctccctccacaatccattattctgttctgcagctcaaacgtgctttctttactattcctttgcacccttaatcccagcctctcttcgctttcacttggactgaccctgacacccatcaggctcagcaaattacctgggctgtactgccgcaaggcttcacagacagaccccattacttcagtcaagcc

SEQ ID NO: 3152 - DNA, 225 bp, Homo sapiens
  source 1..225: mol_type = other DNA
taagagcaaacagttcaggacagactagattccattctcagtgctaccatttattgactagaattccttgagcaaataattgaccggtgactcacttttcttttctgaaaaatggggatcattagggtacctacattacataggctgttgtgagaattaaacctgacaacacatgtaaatatatttgagctgtgctggcacaaaatagacgctcaacaaattctg

SEQ ID NO: 3153 - DNA, 494 bp, Homo sapiens
  source 1..494: mol_type = other DNA
aatacccacattggggaaaaaagacatgataagattttcagatgaggtaagtaactaactacattctacagtaggtgtttagaactcaaatgaaaagaatatgtctggagatgatccttatatttaaacaaaaactgatgctggaggtatgtgtaaatgtgtaaaaaataaaatcacaaaattctggagggagaagggaaaaatgaagaaatctatcacccagctattaatctccaggaaaggaaactgtgccaaaatgtgagaactgaaaaaaaaaaaaaaagaaagaaagaaagaaagaaaaaatctgcagttaaaccacaagaaatctggaaacatttagaagacttcattagaaattcaatatatatgtattctgagaatcaaacagatcatggaatggtgaaaggaaaacaaaactgtgaatatccagtgaagtcaaagaatctgttgttggaaagagaaaaataaaatctttgagaaagagaaaaaca

SEQ ID NO: 3154 - DNA, 269 bp, Homo sapiens
  source 1..269: mol_type = other DNA
cactttgggaggccaagacgggtggatcacaaggtcaggagatcgagaccatcctggctaacacagtgcaaccccgtctctactaaaaattcaaaaaattagccgggcatggtggttggcgcctgtagtcccagctactcgggaggctgaggcaggagaatggcgtgaacccaggaggtggagcttacagtgagctgagatcgtgccactgcactccagcctgggcgacagagcgagactctgtctcaaaaaaaaaaaaaaaaaaaaaa

SEQ ID NO: 3155 - DNA, 755 bp, Homo sapiens
  source 1..755: mol_type = other DNA
ttagaacaaacaaaccatattttatatgagtgtttttaactcctgtctctgggccaatgtctcataaataagctaaaaaaggtttttgagtaaatgcaattgattgaggcatgtgcactgttggtaagatcagtttggcattttaagtctgacatgttatcaaattgctaaatgtatggttgtgaaaatctaacagctgactgcagagccactgaacaattttgtagaatttctcctgttctaattactgaatatgttgaacagtgttaacaccactcatgaactgaaatgttctgatttaataaaaagacaatccttgggtagggtcaagctaaatcctaatgtctacagatttggcgaaacaaggacagaatgtgtacatttatgtgtaggggttctctttaaaacgtatttttaatgatgaaaaatatctccccaatagttttcaagtgttacacgtaaaccttttgataagaaggtacaagcttatgcatagacgtcactctcctctatctttttaattgagcagtctctgtatgactatacgaatcataagaggtcactttagaagtatgtgcctatctgaaaataacaactctattttactgtcaggcaagtgttgtgttcaccttcaggaagcagggcaaacacatgattttaaaaataattttcctattggccgctattgcttcattgattcaaactgtggacctcactcttacttagaatatgatacatttccttaaaagaaattt

SEQ ID NO: 3156 - DNA, 277 bp, Homo sapiens
  source 1..277: mol_type = other DNA
ggcagggtgtggtggctcaagcttgtaatcccagtactttgggaggccaaggagggaggattgcttgagcctaggagttccagaccagcctggacaacatagtgagacctgtctctatcaattttttttttaattagccaggcatgatggtgcatacctgtagtctccgctatgcaggaggctgaggcaggagaatcacttgtgtgtgtgaattcaaggttgcagtaagctatgatgatgccactgcattacagccttagtgacagagcaagagcct

SEQ ID NO: 3157 - DNA, 132 bp, Homo sapiens
  source 1..132: mol_type = other DNA
ctctctcatcccaccccaaacttcaacctatttgaggacaaagattgtacctacttttatataccattctttctttagggtctagcacaattcctggtacgtgatagcctttcatgaatatttgttgaataa

SEQ ID NO: 3158 - DNA, 1743 bp, Homo sapiens
  source 1..1743: mol_type = other DNA
agagaggattctgggaagatggcacagtaggaagcaacaggaatatgtttcctcattgagacaacaattgctctggcagaatttgtctgatgtaatattttggaacactggagtctactgaaggcttgtgacttccaggggaaggcttggacagtaaagtgcagttaattttgatcattttcaggctttagtgcagcaacagctacccatcccacattccgagctctgtggcaggcagctgtgcaggtgttcctgtaacagcttgtggggataagggtgagcaaaaaagaccttgtcctgcaaatataaggaatctttggtctgatctccgattaattcttctgatcacagaagcacagataaagaagcaggtaaccgttattgttacatctgcctccattgttgtaagccccacctcctgtgactgaagagatttccagaggacttaaaggaccagcatgctcccccccccacaacctttttatttttctttttttctcccttttggaagccaagcattaataactagcacattcaaaaataattgtatatcttggaaaattagaaagtgacagcacatgcccaggcaaaaacacaggctcagaaaagacctgaggagggcctaagtttaactctcaggctgatccatggcacagaaacagcctaaacaatttttaaaaaccaataaacaaaaacatcaaactaagtatgggaaagatttccaaagttaccacattattagatacaaatgtccaattttcaacaacaaaaaatcataaagcatataaagaaagaaggtagtatggcacattcagatatataaaaatgagtcaacagaaactgtccctaaaaagaactaatggcagatttacctgacaaagactttaaaaccatggtcttaaagatactcatctttaggaagatgtggagaaagttaaaaaaatatgtatgaacaaagtataaatatcaataaatagcaaacctaaaaataaacaaattacggagctgaaaatttcaataactgaaaaaaaattacaagagaaattcaaagacataggtgaccagttataaaaggagaatctctgaagttgaagatgggaaaatagaaactatcaagcctgaggaataaagcaaataagatgaagaaaacagaacagaacccaaatgattggtgggacaccatcaagtgaaccatctacacattatggaagttccagatagggaagagaaagggaaagaaccagagagaacatttgaaaaaataatggccaaaaacttctcaattattattaaacacagaaatataaatatacaagaagctcaacaaactccaagtaactcaaagagcctcaagataagacacattataatcaaacttaggaaagacaaagataatttgaaagcaacaagagaaaatgacacatcatatatgagagctactcaataagattaaaagcagattcacatcagaaacttggataccagaaggcagtggcctggaagaaattgaaacatgtccaaataaatgaaatctaaggaatttccttacccgtagaactgccctgaaagaagtacttcatggagttctgcaaggtaaaatgaaaggacaccagatagtaacctgaagccatatgaagaaataaaggtccaaatgaagataaatatctgggaaattatataagataatattattataacaatggattgtaacttcactctttgttttgtttctttttattttct

SEQ ID NO: 3159 - DNA, 507 bp, Homo sapiens
  source 1..507: mol_type = other DNA
gtaaaggttttcaacatgtcttaaaattgacactttcccatggggaagtagggtctgcattctctcccctggaacctggactaaacttagggaatgattgactggtagagcacagaggaggtgatactcggtgatttccaaggctagatcataaaaggcaatagagtttctgcctgattttctcaaaatacttttccttcagagctttgagccaccagatgagaagtctgagttttgtcatgcttcacatgaagacgtcactgtaagcattttggctgacttccccagctgagatcccagccaagagctagcattaactgccacatatctaagtgaagatgcagccagatattaccagttaccaaccactgagccattcaaagccacagagtaactcccaggcttgagtgatgaacttccagatatcatgaagcagaaacaagctgtctccactgtctgcccaaattcctgacccagagtctagagtataacaacatggttacttta

SEQ ID NO: 3160 - DNA, 299 bp, Homo sapiens
  source 1..299: mol_type = other DNA
gtggtggctcacacctgtaattccagcactttgggaggccaagacgggcagattgcttgagctcaggagtttgagaccagcctggacaacatggtgaaacccagtctctaccaaaaatacaaaaattagccaggtgtggtggtgcacgtctgtggtctcagctactgtggacactgaggcgggaggatcgcttgagcctgggaagcagaggttgcagtgaactgagatggtaccactgcattccatcttggccaacagaatgagactctgtcacaaaaagaaaaaaaaaaaaagataaa

SEQ ID NO: 3161 - DNA, 2462 bp, Homo sapiens
  source 1..2462: mol_type = other DNA
aatagagaacagaaatataacagggaaaatcaacaaaaccagaagttggttcttcaataagatcaacaacattgacaaactttagctatagatggactaagaaaaaacagagaaaactaaaattaccgaaatctgaaatagaagtgaggacatcgctactgattcaacataaataaaaaagattataagagagtactgagaaaattgtataccagcaaattggatatttctagaaccacaaaacctaccaaaactatgccataaataaatagaaaatctgaatatatctacaagcagtaaagagattggatcataaatcaaaaatctcttgaaaacaacagcccagtaactgatggcttcactggtgaatgctaccaaacatttaaagaacactaatccttctcaaacttttccaaatatttgaagaggagggaacattccccttacttattcatgaagctagcattaccctgatatcaaagcagaaaaagacactgcaagaaaaaaactacagaccgatatcccttatgaacattgatgcaaatatccttaacaaaatactgtaaaactaaattcagcagcatatgaaaggattatacacaattaccaaatagaatttattcctggaataaaggatggtttgaaacaaaaattgatcaatgtaatatacacattaacaaaataaagaggaaaaaaaacacattatcatcccaatttttgcatttgtcagaattcaacatccttttacaacaaaaacaatcaacatactagtaacagaagaaaactaccccaacgtaagaaaagccatatatgaaaaacccatggtgaacatcataatcaatggtgaaagactgaaaacttttcctctcagatcaagaacaaggcaagggtgtgtgctttcatcacttctattcaacataatactaagctcatccacagcaattaggcaagagaaagaaattaagaggagtatccaaattgaaatggaaaaagtacatttatctctctttggagatatatgatcttctctatagactactacaaagatcacacacacacacctgttagaactaataaataatttcagcaaagtagtacacaaaatcaacgcacaaaatcagttacatttctatacactaaaaatgaacaatctgaaaagaaatgtttggaaataattcaatttatgaaagcatcaaaaacaacaaaatacttaggaataaacttaataataagaaagatgtacaataaaaactataaaacattgctgaaagaaattaaagaagttataagtaaatggaaagacatctcatgtttacagattgaaagacaacactattaagatatcaatactacccaaagtgaactactagctcgatacaatcccaatcaaaatcccaatgacattttttgcaggacttcaaaacttactacatagctatagtaatcaaaacagtgcagtaatagcataaagacatatataggccaatggaataaaatacagagccccaaaataaagctttgcctgtatgattaaataattttcgacaagggtaccaagactattcaatgggggaaaggacagtattaacaaatggtgctgggaaaactggatgttgaaattcaaatgagcgaagttggacccttacctaacaccatatacaaaaattaactgaaagtgaataagggacctaaatgtgagatgtgaaactgtaaaactcttagagaaagacagggcaaatcacaacatttgatggcaatgatttcttggatatgacaccaaaggcacagacaacaaaataatagacaaaaaaggcaagttgaactttataaaagtttttacaaatggctctgaaagacactatcaacagagtaaaaaggcaatacacagaatgttagaaaatatttgcaaatactatcataaaaagaatattcagaatattaattgaatattgcccttattaaaaaaaaatgggcaaaagacttgaatagacatttatctaaagaagacacagaaattactaataagcacaggaaaagatgctcaacatcactaatcattagggaaaagcaaatcaaaactacagtagatgccatctcacactccttatatagctgctattaaaaaaaaaaaaacagaatataacatgtgttggtgaagaagcaaataaattaaaacaattttgcaccggtggtaggaatgtaaaatggtacagatgttgtggaataccaacacctgtaccattttacattcttaccaccagtttggtaattcctcaaaaaattgaaaatacacttaccatatcatccagcaatttcacttctaagtatattcaaaaaaattgaaagcataatctaaaaatatatttgtatacccacgttaatagcattattcacaacagctaaaacatggaagcaacctaactgcccagtgacagataaatagataagcaaaacgtgttttt

SEQ ID NO: 3162 - DNA, 204 bp, Homo sapiens
  source 1..204: mol_type = other DNA
gagctttagggtttttaagcagatctgggttgcaaacctgcctctactgctttactattcatgtgatctctcaaaattagtttcatcatctatataatgaagttataatagtaagaatttcccaaagttttttgaggattaaataagataatacataagtaattagcacagtttctggcccatggttactctgtaaatggtggt

SEQ ID NO: 3163 - DNA, 218 bp, Homo sapiens
  source 1..218: mol_type = other DNA
gccttttcttccattgcctacttgcattcctttccaactctgcagaactgcttccattatctcaactgcaccatgctgttatacatttccttgctctcatacctgactattctttggaatgcccttaactaacctctgtcttttgattgcctggtaaactaacccccattcttgcagatcccgctcaagctttaccttctatgtgaagtcttctctaa

SEQ ID NO: 3164 - DNA, 183 bp, Homo sapiens
  source 1..183: mol_type = other DNA
ttagctgggcatggtggcatgcaactgtagtcccagctactcaggaggctgaggcatgaaaattgcttgaacctggggatggaggttgtagtgagcccacatgacattgacattgcaccactgtactccagcctgggcaacagagtgagactccgcctcaaaaaaaaaaaaaaaaaaaaaaaa

SEQ ID NO: 3165 - DNA, 399 bp, Homo sapiens
  source 1..399: mol_type = other DNA
tgctagaatgtagtgttaaatagattttgaaaagaaagcagtgatcactagaagccaacatgtgttccctgggaacaaagtatagcgtggcaaatagattttttttaaatgagcaaatataattccaggctgttggatcaaggaaatgccatttactttgagtatctgtacttcaacaggcttccaatagacttattaatatattatgggtcaaaaatgagctagatttttttttctcaagcaattacgccaaaataatactgattgatagtgatagaggtctctctcattctctctcaggccaggatcaacacttggataaaaccataggaagcaaattttccatcatgtgtatgagacaaagataaggggatagctgaggtgtttgttgatggaatt

SEQ ID NO: 3166 - DNA, 272 bp, Homo sapiens
  source 1..272: mol_type = other DNA
agacataatgattggaaataaagaaagtaacattgtcctatttgtaaatgatataatggtttatgtagaaaatcccaaggaaactataaacaaatttctagaacaaacaaatttagcaatatcacggggttcaaaattaatataaaaatcaatagtataattataaattagggacagacaattgggaaatcattgactttaaaaatatcatttataatcgttcccttacccccaaaaatgtatactaaggattaaatatataaaagatgtct

SEQ ID NO: 3167 - DNA, 298 bp, Homo sapiens
  source 1..298: mol_type = other DNA
gctgggagtggtggctcatgtctgcaatcccagcactttgggaggcctatgcgggtgaatcacttgaggtcaggagtttaagaccagcctgaccaacatggtgaaaccccatctctactaaaaatacaaaattagccaggcatgatggtgcatgcctgtaatcccagccacttgggaggttgaggcagaagaatcacttgaacctgggagatggaggttgtagtgagccgataaagcaccattacattccagcctgggtgacagagggagactctgtctaaaaaaaaaaaaaaaaaaa

SEQ ID NO: 3168 - DNA, 262 bp, Homo sapiens
  source 1..262: mol_type = other DNA
cctctacgtaccaggcaaaatcttattcatatttcaaaactcaactcaggtgtcatttttgtaattctttgtccctccacctttacctgcaccccccaaaaaataaatcagttctcaaaactatttctattacatacccatgttcctgtcattgtatttattacctgtattctaatttatttgtttacatgcctgtcttcttttgacttagttactttatggactggactttaataagttctctatcccaagtttccagccc

SEQ ID NO: 3169 - DNA, 218 bp, Homo sapiens
  source 1..218: mol_type = other DNA
acaacataacacagtcagcatttagaagcatggactctgaagcaaaactgtctgagtctgaatttgaactctatccctttaaactgtgtttaaacttgaccaagttactaaacctttctgtgcctcagtgtatacacttgtaacatgcaaatcacaataatactcacctctcaaggttgttgtaaagattaaattgagttactacatgtaaaacattt

SEQ ID NO: 3170 - DNA, 277 bp, Homo sapiens
  source 1..277: mol_type = other DNA
agagttctcaaactagtaatccactagcctaattcagctcgcgtatatattttatttggcccatacagtttttgtttatttttagaaattgcaccagcattaaaaacggatacatttgatataaaaatccacatttctagcttttctcaaaaatatattaagatctagatccactagacctataattctacatgagaaaatttggctaagctgagtaggggctgccttctataggcaatgtgtatggtcttcattcagccatggtctctaccagttc

SEQ ID NO: 3171 - DNA, 188 bp, Homo sapiens
  source 1..188: mol_type = other DNA
cagtttagctattgatgaaaaagcatagtctctgaagccagatcatttgattcagaacttgtccctaccatttttagctatataatcacaagtaagttactttacctcttgaagcttcagtttcctcatttgcaaaagcacaataacagtacctccttagattggttgctgtgaaggtggaatgagat

SEQ ID NO: 3172 - DNA, 302 bp, Homo sapiens
  source 1..302: mol_type = other DNA
gctgagtgcggtggctcatgcctgtaatcccagcactttgggaggctgaggtgggtggatcacctgaggtcaggagtttgaaaccagcctgcccaacatggtgaaacccatctctattaaaaatacaaaaatgggccgggcatggtggcaggcacctgtaatcccagctactcaggaggctgtggcaggagaatggcttgaacccgggaggcagaggttgcagtgagccaagatcgcgccattgcactccagcctgggggacaagagcgagacttcatcaccaaaaaaaaaaaaaaaaaaaa

SEQ ID NO: 3173 - DNA, 305 bp, Homo sapiens
  source 1..305: mol_type = other DNA
gctgggcgcggtgactcacgcctgtaattccagcactttaggaggctgaggcaggcggatcacctgaggttgggaggttgacacgagcctggccaacatggtgaaaccccgtctctactaaaaatataaaaattagccgggtgtggtggcacgtgcctgtaatcccagatactcgggaggctgaggcaggagaatagcttgaacctaggaggtggaggttgcggtgagcagagatcacgtcattgtactccagcctgggcgacagagcgagactccatctcaaaaaaaaaaaaaaaaaaaaaaaa

SEQ ID NO: 3174 - DNA, 980 bp, Homo sapiens
  source 1..980: mol_type = other DNA
gtaaagcaaaaacaaaattctaagccccccaactgactggataggcccctactgtcagtcaagggattccaaagaaacctgaaaaactagttcaggccatgatgggaagaggaggttggacatgccttattatactttcctccctttggaatttaggcacaactgactaccattaacattaaaactgagatcataagactgacaaaacagactctttgtagcaataagataccaaattctaacctgactctagtataacattacatgacagagtaggccctgaaagaaataaaaagattttactgcaaaaaatatttatttgacctgcaaagccatctcttgtggggaaaatttacactgtgtagacaatccccatctctttccaggtctttttctaatcctgaagagattagcttagggtctagcatggtttaaaggtctgaacaggaaacatttgccatctgttttctctaagggtggccacctacaagatgtcatctacatgataggaaccttggtctctacaaccccttatcttaaaccagataccctttctgtcccatctattgcctctaagggtggctacctatgagacttcatctacataataggaactttggtctctacaacctcttatcttaatccagacactcctttccactgattccaggtctttaaataataacttaactctttcaatcaattgccaatcagaaaatctttaaatccccctatgacttgtaaaccccttgctacaactcgccccacctttctggaccaaaccaatgtatgccttacatgtattgattgatatctatgtcttcctaaaacatacaaaaccaagctgtaacccaaccacctgatacgcctgagcacatgttctcagggcctcttgaggttctgtcatgggtcatagtcctcacatttggctcagaataaatctcttcacattctttagagtttggcttttttcatcaata

SEQ ID NO: 3175 - DNA, 189 bp, Homo sapiens
  source 1..189: mol_type = other DNA
tttgggtacatgctgggttaaacaaagccagacagctttcttttgtcagtgcttttactatgctaatatacttcccattactctgcagaggggttagggtatgtagtgttgacaacacttatgtgtctgtgggacatttttagagcttcttatgagacttatgttccagagaaagcactgagaatcact

SEQ ID NO: 3176 - DNA, 485 bp, Homo sapiens
  source 1..485: mol_type = other DNA
atgaactcaccccatcagacctcaacagtcttatctgccttcattcctccttacacactggaatatcaggcaaaactaaatggctgttgctcctcaacagtgttaaaggccttgcctcagtgtcttcctttacactattcccaacacctagacataatcacatgtctaaattcaacccactcttcaaagccatgctcaaaaatgagttcttccatgaagcattactacactataccactccagccaaagtattattgcattgtcataccatcttatgaactcctagcagtttcttgtaatcctcctccactcaccctggttgacatttcacttatattcccagtaagtgtgccatcttggctttctctctcctaccaggctccagtctcctttagcatgaaaactagaacatattcatcttcatattattatagtagtaccttgtgcttatgagtcgcacagttaatatatgttgaatgactaaa

SEQ ID NO: 3177 - DNA, 294 bp, Homo sapiens
  source 1..294: mol_type = other DNA
ggccaggtgggatggctcatgcctataatcccagcactttgggaggccaagacggtggatcacttaagatccagatttggagactagcctgggcaacacagcaagaccccatctctacaaaaaatgcaaaaattagctgggcatggtggcatatgcctgtggtcccagctacttgggaggctgaagtgggaagatcacttgagccagggaagtggaggtgcagtgagccaagatcccaccactgcactccagcatgggtgactgagtgagatcctgtctgaaaaaaaaaaaaaa

SEQ ID NO: 3178 - DNA, 601 bp, Homo sapiens
  source 1..601: mol_type = other DNA
ttgaatgtgtgcagaacatagaagcttgcttccaaagaattactgtacggtgaggaaaaactattagcaactttacaatggagaaatctagcaaacactatgttgaccaggttatcaaggttaatgtcaccagtaacaggcatgttggtatcatataactctaatgggatgggatgagaagggcatgctgcctgtctagtattcttcctctacacctataacgctagtataatcaaagaaaacaaaaatgtcaggcaaaccaatttgaggatattcaccaaaattcctgtctagcactcttcaaaattgtcaagatcatgaaaaacaaggaaagactgagaaactatcacaaataggaagagactaaggtaacatgagaactaaatgtaatgtgggatcctgaattagatcatggaacaggaaaaagacattagcagaaaaactggtgaaagtgaaatagagacagcattgtagtcaatagtaacttaccaatgttcatttcttaggttttgactgtttttccttggttttgtaagatgatgacattaagagaaactggatgaagggtatgcagcaactctctatgacctcttaagcatgt

SEQ ID NO: 3179 - DNA, 1958 bp, Homo sapiens
  source 1..1958: mol_type = other DNA
atacttaatacatagcccacaagcactatgaagaaactacacaatcaagtctacgtaacagccagctaacaacatgatgacagatcaaaatcatacatcttatactaatcttgaatgtaaatgcacttaataccccacttaaaagacacagagtggcagctagataaaaagacaagacacaaacataggttgtcttcaacagacccatctcgtaggtaacgacacccatagggtcagagttaaaagggtggaataagatctaccatgcaaatgggggggaagagggagcaagagttgctattttcatatcagataaaacataccttaaaccaataaaaattaagaaggacaatgaaggccattacacaatgataaagggtacaatccaacaagaagccttaactattctaaatttatatgcaccaaaattggagcacccagattcataaaacaacttctttttggcctgtgaaaagactaagacaactacacaatagtagagggagacttcatacccaattgactgttagatcatcgagggaaaaatctaacaaagaaactctagacctaaactcgacatttgaccaaatggaccaaatagaaatctacagaacattatgctgaataaccacagaatattcttctcatctacacacagaacatattttgagattgaccacatgctcagccataaagcgagcctcaatacattaaaaaaaattgaaattatagtagcatgttttcagaccataggacaatgaaaatagaaaccaatatcaagaagatctctccaaactgcaccaatacatagaaattaaaaaacttacccttgaaataaaaaaatctttgcagttaatgaaaatgggagacatcttgccaaaatctctggaatacagccaaagcaatgttaagaggaatgtttgtagccttaaatgccttcatcaacacattagaaagccctcaagttaactttgcacctaaaggaactaggaaaaaaggaacaaatcaaccccaaaactagcaaaagaaaagaaataactaaaattagagaggaacttaatgaaattgacattcgaaaattcatacaaaaatcaatgaaaccaagagttggttttttgaaaacataaataagattgatagacccctagctagattaacaaagaaaaataaagagaagatccaaatgagcacaatcagaaatgaaaaaggtaatattacagctgatcccacagaaatacaaaagatcctcagaaaatactatgatcaactctatgcacacaaattagaaaaactagagtaaatggataaattcttagaagcacatattctcccaagattgaatcaggaagagattgaaatcctgaatagaccagtatcaactttggatattgaatcaataataatgaatctgccaatcgaaaatagccctggaccagatggattcaaacctgaatcctaccagatgcacaaaaactgttaatcccacagaaactattccaaaaatttgaggaggaagagctctttcccaactcattttataaagccagcattagtctgataccaaatctggtagagacaaaacgaagaaataaaacttcagtccaatatccttcatgaacatagatgtaaaattcctagcaaatggagtccagcagcacatcaaagtgttaatcaatcgcaatcaactagattctactactgggatgcaaagctattttaacatatacacatcaataaatgtgaatcatcacataaacagaatcaaaagtgaaaaccacatgatcacctcaatagatggagaaaagcttttgataaaatccaacgtcccttcctgttaaaaccatcaaaggaacatacctcaaaataatagccatttatgacagacccacagccaacatcatactaaataggcagaacctcaaactattcctattgagaactggagccagattaggatg

SEQ ID NO: 3180 - DNA, 58 bp, Homo sapiens
  source 1..58: mol_type = other DNA
actaactaggagggtgagttggccctgtctcttcttttttctggacctcagtttcctc

SEQ ID NO: 3181 - DNA, 338 bp, Homo sapiens
  source 1..338: mol_type = other DNA
tacacaccacagaatactactcagccaaaaaaaaataatgaaatcttatcttttgcaacaacatggatggacctggaggccattaagtgaagtaatgatacagaaagtcaaaaaccacatgttctcgtaagtgggagataaacaatgtgtacacctggacgtggagagcagaatcatagacactagagccttcaaaggtgggagtggggtgagagatgggaaagtatttactaggtacaatgtatactatttgggtgagggtatactaagcccagatttcaccactatgcaatatatccctgtaataaaagtgacataaatccataaaaattacaaaa

SEQ ID NO: 3182 - DNA, 309 bp, Homo sapiens
  source 1..309: mol_type = other DNA
gctaggcatggtcactcacgcctgtaatcccaacactttgggagcccaagacaggaggatcccttgagtccaggagttcaagaccagtctgggcaacacagggacaccccatctcgaccaaaaaaaaaaaaaaaagccaggcatggtggtgcacttctgtggtcccagccacttgagaggctgaggtgggaggatcacttggccccaggaggttgaggctgcagtgagtcgtcattgtgccactgcactccagcctgggggacacagtgagaccctgtctcaaaacaacaacaacaaaaacaaagcaaa

SEQ ID NO: 3183 - DNA, 223 bp, Homo sapiens
  source 1..223: mol_type = other DNA
acagtacagctctggggggcagagctatgggggcagactacctggttcataccccagcatttccacttattaactgtgtgacctttggcaagttgcttatcctctctgtgcaccagttttctcagttataaaatgggaatatgaactgtatcaatcacacagatgtaaagctgttgtaaaggggacaaactaaggtaagtactcattaaatattagctattat

SEQ ID NO: 3184 - DNA, 1201 bp, Homo sapiens
  source 1..1201: mol_type = other DNA
gggtaatactttttaaaatataatgtactttcctcttttgcatgtctttatatatatttaacctcctccttactctgccagaagcatctatttgcctcaaggaagtttaggatagttatagcagcaggcaaagagaaagcgtcaatgttcagctgttgacatccaaaataggatttttttagtatgcagcttgaattctcaagctcccactaacatattaagatacagcctgggtggacttgaccattaaggttttctttaaaccagagatagacagtactaaggatatgacataggggagatccctgccataaggaaagagggaaagcccttttcctcgggcatctggggaacatgggaaaaattcagtctagatcggataccagggtctcaggctccactatatatactcccaccttaaggctcaaccagagttcagggaacagctttggaaataccctaatggttatgagggcacctgagaaccctaaggctactcctgaggtgttgaaggcctctagaaaaatgcctaccttttcaccagttgtggtgtggaggggagaggatggtggtgaacagatgaaaacacagcactggccaaggtgaatgtctagttagggagccaagtgcagaggttctgtcttctcacacttggtgctgagcaagctgggatccatatgcttctttgttccctgctgatggtactcattcagtgactgggcaaaggcctggagtcaggactaagaggctgccatatgtagggtctttgaccgcataggcaaaaagtaggacataaattttagtcctgggtattagcacaatattccaaaaaacaagagaggtcatcagaccagccctgcctccatgaagcaaagaccagtgggatctagctatcttgccttggctccaagtacccttcttcctttgctcccatcactaccaccacaagttcatgtaaacacctctatgcacccagaccccactctgaagagaagtggaggaacataagaaaaatctgagcaactgagcaatttacctaaatgaaatagtcatccaaaagagattaatccagaaaaaagaataatatattataaactagcaaaacaggggtgggggcttatcagaaagactggctccactttagaaaatttgaaaagctacagtttctttgcacatctgggtaataagaagtaagtgtgca

SEQ ID NO: 3185 - DNA, 154 bp, Homo sapiens
  source 1..154: mol_type = other DNA
ggcagggggctacagtgggcagagtagctgggggagtcaggcagacaagggtttcagtcctgcttctacagggcaagctatttatcctctctgaaggtttctgtacctgagaaatgggcacttccatgcccacctctcaaggatactgtgagga

SEQ ID NO: 3186 - DNA, 304 bp, Homo sapiens
  source 1..304: mol_type = other DNA
caggcgcagtggttcacacctgtaatcccagcactttggcaggtcgaggctggcggatcacctaaggtcaggagttcgagaccagcctggccaacatggcggaactgtctctactaaaaatacagaaattagccaggtgtgatggcacacacctgtaatcccagctgcttgggaggctgaggcaggagaatcatttgaacccgggagacagagcttgcagtcagccgagatcgcaccactgcacgtcagccagcctgggtgacagagcgagactttcaaaaataaataaataaataaaatagaa

SEQ ID NO: 3187 - DNA, 7529 bp, Homo sapiens
  source 1..7529: mol_type = other DNA
ctggcgcccaacgtggggcttttctctagggtgaaggtacgctcgagcgtggtcattgaggacaagtcgacgagagatcccaagtacgtctacagtcagccttacggtaagcttgtgtgctcagaagaagctaaggtgataatggggcaaactaaaagtaaaattaaaagtaaatatgcctctcatctcagctttattaaaattcttttaaaaagagggggagttaaagtatctacaaaaaatctaatcaagctatttcaaataatagaacaattttgcccatggtttccagaacaaggaactttagatctaaaagattggaaaagaattggtaaggaactaaaacaagcaggtaggaagggtaatatcattccacttacagtatggaatgattgggccattattaaagcagctttagaaccatttcaaacagaagaagatagcgtttcagtttctgatgcccctggaagctgtttaatagattgtaatgaaaagacaaggaaaaaatcccagaaagaaacggaaagtttacattgcgaatatgtagcagagccggtaatggctcagtcaacgcaaaatgttgactataatcaattacaagaggtgatataacctgaaacgttaaaattagaaggaaaaggtccagaattagtggggccatcagagtctaaaccatgaggcacaagtcctcttccagcaggtcaggtgcctgtaacattacaacctcaaatgcaggttaaagaaaataagacccaaccgccagaagcttatcaatactggccgccggctgaacttcagtatcggccacccccagaaagtcagtatggatatccaggaatgcccccagcaccacagggcagggcgccataccctcagctgcccactaggagacttaatcctatggcaccacctagtagacagggtagtgaattacatgaaattattgataaatcaagaaaggaaggagatactgaggcgtggcaattcccagtaacattagaaccgatgccaactggagaaggagcccaagagggagagcctcccacagttgaggccagatacaagtctttttcgataaaaatgctaaaagatatgaaagagggagtaaaacagtatggacccaactccccttatatgaggacattattagattccattgctcatggacatagactcattccttatgattgggagattctggcaaaatcgtctctctcaccctctcaatttttacaatttaagacttggtggattgatagagtacaagaacaggtccgaagaaatagggctgccaatcctccagttaacatagatgcagatcaactattaggaacaggtcaaaattggagtactattagtcaacaagcattaatgcaaaatgaggccattgagcaagttagagctatctgccttagagcctaggaaaaaatccaagacccaggaagcgcctgcccctcatttaatacagtaagacaaggttcgaaagagccctaccctgattttgtggcaaggctccaagatgttgctcaaaagtcaattgccgatgaaaaagcccgtaaggtcatagtggagttgatggcatatgaaaacgccaatcctaagtgtcaatcagccattaagccattaaaaggaaaggttcctacaggatcagatgtaatctcagaatatgtaaaagcctgtgatggaatcggaggagatatgcataaagctatgcttatggctcaagcaataacaggagttgttttaggaggacaagttagaacatttagaagaaaatgttataattgtggtcaaattggtcacttaaaaaagaattgcccagtcttaaacaaacagaatataactattcaagcaactacaacaggtagagagccacctgacttatgtccaagatgtaaaaaaggaaaacattgggctagtcaatgtcattctaaatttgataaaaataggcaaccattgtcaggaaacgagcaaagaggccagcctcaggccccacaacaaactggggcattcccaattcagccatttgttcctcaaagttttcagggacaacaaccccccctgtcccaagtgtttcaaggaataagccagttaccacaatacaacaattgtcccccgccacaagcagcagtgcagcagtagatttatgtactatacaagcagtctctctgcttccaagggagtccccacaaaaaatccccacaggggtatatggcccactgcctgaggggactgtaggactaatcttaggaagatcaagtctaaatctaaaaggagttcaaattcatattagtgtagttgattcagactataaaggcgaaattcaattggttattagctcttcaattccttgaggtgccagtccaggagacaggattgctcaattattactcctgccatatattaagggtggaaatagtgaaataaaaagaataggagggtttagaagcactgatccaacaggaaaggctgcatattaggcaagtcaggtctcagagaacagacctgtgtgtaaggccattattcaaggaaaacagtttgaaaggttagtagacactggagcagatgtctccatcattgctttaaatcagtggccaaaaaattggcctaaacaaaaggctgttacaggacttgttggcataggcacagcctcagaagtgtatcaaagtactgagattttacattgcttagggccagataatcaagaaagtactgttcagccaatgattacttcaattcctcttaatctgtgaggttgagatttattacaacaatggggtgcagaaatcaccatgcccgctccattatatagccccacgagtcaaaaaatcatgaccaagataggatatataccaggaaaaggactaaggaaaaatgaagatggcattaaagttccagttgaggctaaaataaatcaaaaaagagaaggaatagggtatcctttttaggggcggccactgtagagcctcctaaacccataccattaacttggaaaacagaaaaattggtgtaggtaaatcagtggccgctaccaaaacaaaaactggaggctttacatttattagcaaatgaacagttagaaaaaggtcatattgagccttcattcttgccttagaattctcctgtgtttgtaattcagaagaaatcaggcaaatggcgtatgttaactgacttaaaggccataaatgccgtaattcaacccatgaggcctctccaacctaggttgccctctccggccatgatcccaaaagactggcctttaattataattgatctaaaggattgcttttttaccatccctctggtggagcaagattgtgaaaaatttgcctttactataccagccataaataataaagaaccagccaccaggtttcagtggaaagtgttacctcaaggaatgcttaatagtccaactatttgtcagacttttgtaggtcgagctcttcaaccagttaaagaaaagttttcagactgttatattattcattatattgatgatattttatgtgctgcagaaacgaaagataaattaattgactgttatacatttctgcaagcagaagttgccaatgcaggtctggcaatagcatctgataagatccaaacctctactccttttcattatttaagaatgcagatagaaaatagaaaaattaagccacaaaaaatagaaataagaaaagacacattaaaaacactaaatgattttcaaaaattgctaggagatattaattagattcggccaactctaggcattcctacttatgccatgtcaaatttgttctctatcttaagaggagactcagacttaaatagtaaaagaatgttaaccccagaggcaacaaaagaaattaaattagtggaagaaaaaattcagtcagcgcaaataaatagaatagatcccttagccccactccatcttttaatttttgccactgcacattctccaacaggcatcattattcaaaatactgatcttgtggagtggtcattccttcctcacagtacagttaagacttttacattgtacttggatcaaatagctacattaattggtcagacaagattatgaataataaaattatgtggaaatgacccagacaaaatagttgtccctttaaccaaggaacaagttagacaagcctttatcaattctggtgcatggcagattggtcttgctaattttgtaggaattattgataatcattacccaaaaacaaaaatcttccagttcttaaaattgactacttggattctacctaaaattaccagatgtgaacctttagaaaatgctctaacagtatttactgatggttccagcaatggaaaagcagcttacacaaggccgaaagaacgagtaatcaaaactccatatcaaccgactcaaagagcaaagttggttgcagtcattacagtgttacaagattttgaccaacctatcaatattatatcagattctgcatatgtagtacaggttacaaaggatgttaagacagctctaattaaatatagcatggatgatcagttaaaccagctattcaatttattacaacaaattgtaagaaaaagaaatttcccattttatattactcatattcgagcacacactaatttaccaaggcctttgactaaagcaaatgaacaagctgacttactggtatcatctgcattcataaaagcacaagaacttcatgctttgactcatgtaaatgcagcaggattaaaaaacaaatttgatgtcacatagaaacaggcaaaagatattgtacaacattgcacccagtgtcaaatcttacacctgcccacccaagaggcaggagttaatcccagaagtctgtgtcctaatgcattatggcaaatggatgtcacgcatgttccttcatttggaagattatcatatgttcatgtaacagttgatacttattcacatttcatataggcaacttgccaaacaggagaaaatacttcccatgttaaaaaacatttattgtcttattttgctgtaataggagttccagaaaaaatcaaaactgacaatggacaaagatattgtagtaaagctttccaaaagttcttaagtcagtggaaaatttcacatacaacaagaattccttataattcccaaggacaggccatagttgaaagaactaatagaacactcaaaactcaattagttaaacaaaaagaagggggagacagtaaggagtgtaccactcctcagatgcaacttaatctagcactctatactttacattttttaaacatttatagaaattagactactacttctgcagaacaacatcttactgctaaaaagaacagcccacatgaaggaaaactaatttggtggaaagataataaaaataagacatgggaaataaggaaggtgataatgtgggggagaggttttgcttgtgtttcaccaggagaaaatcagcttcctgtttggatacccactagacatttgaagttctacaatgaactcatcagagatgcaaagaaaagcacatccgtggagacggagacaccacaatcgagcaccgttgactcacaagatgaacaaaatggtgacgtcagaagaagagatgaagttgccatccaccaagaaggcagagccaccgacttgggcacaactaaagaagctgacacagttagctacaaaatatctagagaacacaaaggtgacacaaaccccagagagtatgctgcttgcagccttgatgattgtatcaatggtggtaagtctccctatgcctgcaggagcagctgcagctaactatacctactgggcctaagtgcctttcccgcccttaatttgggcagtcacatggatggataatcctatagaagtatatgttaatgatagtgtatgggtacctggccccacagatgatcgctgccctgccaaacctgaggaagaaaggatgatgataaatatttccattgggtatcgttatcctcctatttgcctagggagagcaccaggatgtttaatgcctgcagtccaaaattggttagtagaagtacctactgtcagtcccatcagtagattcacttatcacatggtaagcgggatgtcactcaggccacaggtaaattatttacaagacttttcttatcaaagatcattaaaatttagacctaaaaggaaaccttgcctcaaggaaattcccaaagaatcaaaaaatacagaagttttagtttaggaagaatgtgtggccaatagtgcggtgatattacaaaacaatgaattcggaactattatagattaggcacctcgaggtcaattctaccacaattgctcaggacaaactcagccgtgtccaagtgcacaagtgagtccagctgttgatagcgacttaacagaaagtttagacaaacataagcataaaaaattgcagtctttctacccttaggaatgaggagaaaaaggaatctctaccccaagaccaaaaataataagtcctgtttctggtcctgaacatccagaattatggaggcttactgtggcctcacaccacattagaatttggtctggaaatcaaactttagaaacaagagatcataagccattttatactatcgacctaaattccagtctaacacttcctttacaaagttgcgtaaagcccccttatatgctagttgtaggaaatatagttattaaaccagactcccagactataacctgtgaaaattgtagattgcttacttgcattgattcaacttttaattggcaacaccgtattctgctagtgagagcaagagagggcgtgtggatccctgtgtccatggaccgaccgtaggaggcctcgccatgcgtctatattttgactgaagtattaaaaggtgttttaaatagatccaaaagattcatttttactttaattgcagtgattataggattaattgcagtcacagctacggctgctgtagcagaagttgcattgcactcttctgttcagtcagtaaactttgttaatgattggcaaaaaaattctacaagattgtggaattcacaatctagtattgatcaaaaattggcaaatcaaattaatgatcttaaaaaaactgtcatttggataggagacagactcatgagcttagaacatcgtttcacgttacaatgtgactggaatacgtcagatttttgtattacaccccaaatttataatgagtctgagcatcactaggacatagttagacgccatctacaaggaagagaagataatctcactttagacatttccaaattaaaagaacaaatttttgaagcatcaaaagcccatttaaatttagtgccaggaactgaggcaattgcaggagttgctgatggcctcgcaaatcttaaccctgtcacttaagaccatcggaagtactacaattataaatctcatattaatccttgtgtgcctgttttgtctgttgttagtctgcagctgtacccaacagctccgaagagacagcgaccatcgagaacaggccatgatgacgatagtggttttgtcgaaaagaaaagggggaaa

SEQ ID NO: 3188 - DNA, 310 bp, Homo sapiens
  source 1..310: mol_type = other DNA
ggccgggcgcagtggctcatgcctgtaatcccagcactttgggaggccaaggtggatggatcatgaggtcaggagttcgagaccagcctgaccaatgtggtgaaaccccgtctctactaaaaatacaaacaaaaattagtcgggcatggtggtgcgcgcctgtaatcccagctattcaggagggctgaggcaggagaatcgcttcaacccgggaggcggaggttgtagtgagccgagatcgcaccactgcactccagcctgggcaacagagcaagactctgtctcaaaaaaagaaaagaaaagaaaagaa

SEQ ID NO: 3189 - DNA, 410 bp, Homo sapiens
  source 1..410: mol_type = other DNA
cctctcgctaagtcccgaccacctggccctctctctgctcagtgcctgaacacatcaggcttgctgcagcccctgcctttacctctctacttgtagtgttctttcagagcctgctcccatatggtatcacatatcagatatctgatgcagagccttagagaggctgttccaggtcacacaaactaaggaagtccctcagccactccctgccacatcaccctgttctatttccttcacagcacttaactgtatatctgatatttccttgtttctttgtttgttcattgtctgtctctcccactagactgtaagctctttgaggacaggaaatttgtgagatgtattcactgttgtatccccaatacacagtgatggcttgtagcagttgctaaataaatgtttgttgaatg

SEQ ID NO: 3190 - DNA, 151 bp, Homo sapiens
  source 1..151: mol_type = other DNA
ggtgaccctgggttacccaggcaaggctcggtgtttgtttcagaaagcagagaagtatgtaattgattttaaaagtttctgtttaaaatatttggctatgttttagactatgaaggaatgaactttgcttctctggataagaaagtcacat

SEQ ID NO: 3191 - DNA, 121 bp, Homo sapiens
  source 1..121: mol_type = other DNA
gtgtgatagggtggtaagccctgggccatatggaggagcctggggcccatcttggttctgctgctgagttgctgggtggctttaggcaagtcccttcttgtcccttggtcactctgtttcc

SEQ ID NO: 3192 - DNA, 827 bp, Homo sapiens
  source 1..827: mol_type = other DNA
ggacacttcagagatagggacacacgagccaactgacaagagctctcactggccaaagctggctcaatttgagcaacaaaataaatctactaaagtatacaatgaacttccgtaagtccattctgatacaatcttccatgcagaatcccaaataattttggtaaatactcagttctctagaggtgagcataacccctgccacttaagtgtgggctgcatatagtgacttccttccaaagaattcagtatggaaaggcagcagagagtaactttacagtgagaagacccgacaaacatgacctcagccaaagggtcaagctcaccatcaacgatgagtcatgttgctagcatgtgatgagaaccacacatgatacgatgtgatcagaaccacatttcacctctagtcttcctctccataacccacaatcccagtctactcatgagaaaagcatcagacaaaccccaactgagggatgttctacagatacctgatcagtcctcctcaaaactgtcagggtcatcaagaacaaggaaaatctaagaagatgtcacagccaagaggcatctaaggagacatgacaactagttgtaatgggttatcctggatgggatcctgggacagaaaaaggacattaggtaaaactgagaaaatgtgaacgcagtagaataatgcatcagtattggtcattcacggtgacaaatgtgctatctgatgtaacacgttaacaagaagggaaactgggtacaagatacatgggaactccctattgtatgttcacaatgactctgtacatctaaaactgttctgaaaagtttatttttaaaaa

SEQ ID NO: 3193 - DNA, 61 bp, Homo sapiens
  source 1..61: mol_type = other DNA
gccatgtgatcataggactcaaaacagccaaaggaaccaaacagttgaaagtgagtacatg

SEQ ID NO: 3194 - DNA, 259 bp, Homo sapiens
  source 1..259: mol_type = other DNA
tgcctgtaatcccagtactttgggaggctgaagcaggattgcttgagctcaggagttcgggagcctaggcaacatggctagaccacctctacaaaaaaacttcaaaaactacccaggtttggaggtgtgcatctgtagtcccagctacttggaaggctgaggtgggaagatcacctgagcctggggaggtcaaggctgtagtcagtgtgccactgcactcccagcctgggtgagagcaagaccccgtctccaaaaaaaa

SEQ ID NO: 3195 - DNA, 64 bp, Homo sapiens
  source 1..64: mol_type = other DNA
gtttaactcatctattaaaaagtgagttaaaacagatgagttttaaggtccatctcaactctaa

SEQ ID NO: 3196 - DNA, 260 bp, Homo sapiens
  source 1..260: mol_type = other DNA
tggctcacctgagggcaacagttggagaccagcctgaccaacacagtgaaaccccatctctactaaaaataacaaaaattagctgggtgtggtggcggacacctgtaatcccagctatttgggaggctgaggcaggagaattacttgaacggggtgtgggggtggggggtggaggttgcagtgagctgagattgcaccattgcactctagcctgggcaacagagcgagactgtctcaaaaaaaaaaaaaaaaaaaaaaaa

SEQ ID NO: 3197 - DNA, 239 bp, Homo sapiens
  source 1..239: mol_type = other DNA
cttgaggccaggagttcaggaccagcctgggcaacatagcgagacccccattgctacaaaaaatttaaaaatgaaacaagtgtggtggcacatgcttgtagtcctagctacttgggaggctgaggcaggaggattgcttgagtctaggagtttgaggttacagtaagctgtgatcgtgacatggcctccagcctgggtgaccgagtgagactgtttctaaaaataaaaacaaaaaataa

SEQ ID NO: 3198 - DNA, 403 bp, Homo sapiens
  source 1..403: mol_type = other DNA
gacaaagattctttgcttggccaaactttagtcagactcctcaaccttctcgtaggtttatctgtgcatttccttggaaaatccagttagaaccctctaccctcaatatctgatcaggttcctcatcctctaccatccaaggtgatgtctgatcaccttgacctattttcagcaagaaacccctttactcctgaagttccttcttagtaattttttatccagtgaccccaagctttttgttccttggctataaattcccacttgcccatggtgtatttagagttgagcccactctctctctcctaattcagaatcccattgccatggttgctatacctatcctgatggtccggaataaaatctgtcttactgtgctttaataaatatcattaatttttttttt

SEQ ID NO: 3199 - DNA, 191 bp, Homo sapiens
  source 1..191: mol_type = other DNA
cactagacccttggcattaggggatttatcatttccagttctattatctgggaatgactccaagggtttgtgacaagcttttgaaacgtaagtgctaagacgagtgtggacaagtcactgagctaatgaagaatagacccactgtctgcttggctctgctattttgtacctgtcttcacatgtggggaaac

SEQ ID NO: 3200 - DNA, 170 bp, Homo sapiens
  source 1..170: mol_type = other DNA
acgtgacagtcccgatgcctgcaatgctctttgtttcttcctttttattccagtgaacccacagtcagtctaaaaatcttaggtcccaggtcgcttcctataggaggccgcctccaaaccccaggctgagtgcggtcccggtacccacccctccaggggtctcacagttc

SEQ ID NO: 3201 - DNA, 215 bp, Homo sapiens
  source 1..215: mol_type = other DNA
aaccaggaccaggaatgaaagttactgggagataacttcgaaggattttgcaacaaattcgagctgtccgactctgagaatggtcagtttaccaatggttcatttgctattgttggaaacaagcaggcaaatactgattgaccatcttttagacttgtggaagccagtctgatactgagagggtagttggattataaatgacttgtcgggttcct

SEQ ID NO: 3202 - DNA, 87 bp, Homo sapiens
  source 1..87: mol_type = other DNA
ctgttgagcctctggtaagctttcatctcccatgaactcatttccccataaatgaaatgggtaaataatgccccatttgtagaagtg

SEQ ID NO: 3203 - DNA, 1836 bp, Homo sapiens
  source 1..1836: mol_type = other DNA
aagaatagattttataaactaatgaaattggtggcttacaacgggtagatgggaacagaatagaaagaatggggaaatggcaaaggggtagaagataggatgagggcagagagacccttctctgagtgttcctctttatatagctctgactattggaacaatgggatcacatgccagaaaactaaatatacaatgaaagccaatcaggaggcaaggggaacccaagatgaaatgcaaatagtaacaaatgagcctggctctattacaaatgaatacatagccacactgagggcagtaggaaagaaaataacctcagtaatatggaaagcagcattgtgattggatactgcaaggctaaggacaagaaaaggtgtacacaagtcctgttcactagttagtaatttgttttccacaggggtgtggatgagcaattttgaaactattttatgtaagtactaagattgagtaaatgattgtagataatggagccaggtttcttaagttgaagaaaggaattatgaataaaggagtggaggctaaaataaactctttggtgttgtattggaattggaggtttcagtatgaacagttttcaatatgtatacagatggatagttttagaaataagtacagagtggtgtgtgtacacatttgaggatagatatagatagttgcagatataattaatataattatatatttatataaaattttctagctttgccttctaagagggcctagaaaccatgaaaccccagtagcaatgagtacagctagtccccttggtttctaaatgccattcttcaataaaagaaaccagggctccttggagaaatggttgattccagggctggggcagggagcttacaagataagcctgaacatcttgcagttctgaaagcaaggaaatgcttaaatgatgggagaatgtaaaaaagccacaggagccaacttaaaggagctttcattgggcaaatctgggataatttgaggaacaaaatacataatgagaagggattacaccccacagaataaaataagtacccatgaatccatattgacaaaaataaatgattagatgaatacagaaatgcaggagaaaggtcaatccttccttacggtagaatactaattaatattgtagaaagaatgtcagaaatagaaaataactattttacaaactaatttaacagtaataattgttacagagcagaatcatcaatgatgctaaaattagtaggtgaaatatgatgggaatcaggatatttacataatctcaaagtgttttcttacaggacacatattatttacagatacgcagggggaaatactaacttatgtggagaaatctagaatataccactcaaccaagtatcaaagttaatatgaccaaaatgaagacaaatcaacatcatgtaccctctgatgtaggatgtattgagaagagcacagcatcagttctgaggtattcttgcctaaggtgaataagcttaatctaatcatgagaaaacaccaaccaaactgagggatgttctacaaaataactgaccagtgctctttgtaaaagcccaggtgctgaagactgaggagctgtccttgattagcagagactgtagatacaggacaactatgtgcaatgtgagatcctcgattgaactgtggaacaatagggaaatagaaatgatgtctctagatcagtgttgaattaatgttagtttcctggttcagatcactgtaccatggttatttaagttattaacattagtagaagctgaataaaggatatatgggaactctttgtactatctttaaaacactcataagtctaaaattatt

SEQ ID NO: 3204 - DNA, 219 bp, Homo sapiens
  source 1..219: mol_type = other DNA
aggggtcagcaaactacagcccaggggccaaatctggtcaccatctgttttgtccggcctgggaacccagctacacatattcctttatgtactgtctgtggtggctttcctgcttcagaaacagagttgagtagttatgacagagactgtatgtggccttttggtccacacagtctgaaatatttacaatctggccctttacagaaaaagtttgccaac

SEQ ID NO: 3205 - DNA, 245 bp, Homo sapiens
  source 1..245: mol_type = other DNA
ggtagtttgttgctgataaaagaaacaggattagtaatgtagtactagagtcagagtagtgcttaaatcactgctatgctgtgtgaccatgggcaagttatttaacctttttctgcctcagtctcctaatctgtaaaatggagataatagtgtctacctaatactgtttttgtgaggcttaagtgatatacatgaaggcttagaacagagcttttcacataatacgtgctatataaatgtaggtt

SEQ ID NO: 3206 - DNA, 134 bp, Homo sapiens
  source 1..134: mol_type = other DNA
ttgtttgtttatttacctttattttccagctccaccactagattacaatcttcttgaggaaaaaggcttcttttatcttcgttctttgtcttctttctgccctctgcaccatgcctaatggataataagtatcc

SEQ ID NO: 3207 - DNA, 317 bp, Homo sapiens
  source 1..317: mol_type = other DNA
gccgggtgcggtggctcacgccagtaatcccagcactttgggaggccgagatgggtggatcacctgagatcaggagtttgagaacagcctgaccattatggtgaaaccccgtctctactcaaaatacaaaaaattagccggacgtggtggcaggtgcctgtaatcccagctactcgggaggctaaggcaggagaatcgcttgaacccagaaggcagaggttgcagtgagccgagattgtgccattgcattccagcctggacaacaagagcaaaactcgatctcaaaaacaaacaaacaacatcaagaaaaaaaaaaa

SEQ ID NO: 3208 - DNA, 222 bp, Homo sapiens
  source 1..222: mol_type = other DNA
tgaagtggttaagagataagtcttcggagttggacaaaaggatttgaatttaggttctgtggattattatgggtccttgataaattctcaaagcctttttttttgttcatctctaaaataggaatataggattacctaccacattgactcgtaaggactatatgagaccatgtatatagaatgtttaacatagtaccaggctttacaaagaactcaataaat

SEQ ID NO: 3209 - DNA, 325 bp, Homo sapiens
  source 1..325: mol_type = other DNA
gctgggtgcagtggctcatgccagttatcccagcactttgggaggccgaggtgggcaaatcatgaggtcaggagattgagaccttcctggctaacatggtgaaaccccatctctactaaaaatataaaaaattagccaggtgtggtggcacgcatctatcagagtcccagctactcaggaggctgaggcaggagaatcgcttgaacctgggaggtggaggttgcagtgagctgagattgtgccactgcactccagcctgggtgacagagtgagactccatctcaaaaataataataataataataaagtaaaaataaaaataaaa

SEQ ID NO: 3210 - DNA, 81 bp, Homo sapiens
  source 1..81: mol_type = other DNA
ggatgtgccttgtccttccctgtttcagcacttaacacactacctggtacagagtatgtagtgggcatctgttgaatgaat

SEQ ID NO: 3211 - DNA, 102 bp, Homo sapiens
  source 1..102: mol_type = other DNA
agtggttcaggcctggagtatgcatcagaattatctgtgaagcttagtgaaagtgctgatgccagagcccacccaaagcttactgcttcagaaccactgggg

SEQ ID NO: 3212 - DNA, 172 bp, Homo sapiens
  source 1..172: mol_type = other DNA
gacatagctggtttactgcacaaactttaatgtcaaagggattagatcagagctccagtctcacttactgggcctataacattgtgcagggcacttatctcacctcaggaaaatggaagtaactgcttcattttacagaggtattaaatgaaagaaatgagaaaactataaa

SEQ ID NO: 3213 - DNA, 312 bp, Homo sapiens
  source 1..312: mol_type = other DNA
gctgggtgcggtggctcacgcctgtaatcccaacactttgggaggcccaggcgggcgggggagatgacttgaggtcaggagttcaagaccaacctggccaacatggtgaaaccctgtctctactaaaaatacaaaaattagcctggcatggtggcacacgcctgtaatcccagctactcaggaggctgaggcaggagaatcgcttgaacctgggaggcggaggttgcagtgagccgagatcttgccactgcactccagcctgagcacagcaagactctgtctcaaaaaaaaaaaaaaagaaaaaagaaaaaa

SEQ ID NO: 3214 - DNA, 85 bp, Homo sapiens
  source 1..85: mol_type = other DNA
cttacactggactgagctcattggagcacacaaatcatgtcccattcatctttctatccccaaacatccagtacaggttgcagca

SEQ ID NO: 3215 - DNA, 866 bp, Homo sapiens
  source 1..866: mol_type = other DNA
aaaaagctaattggttacaatgaaggttgctagaggtggaatacattatattaaaactgataagagcaagaatatttatcccgccttttctatataaatgcagcactaggtaaccaaatagtagaaggggaaatttttctttatagaagcagtacagctgaaaaataagtgagggagaaaaaaccagagtatcaacaatttgcaaccactgatgaaataatgcatccaggcatgaaacattaatgtcagctaagcctacaaaattaaagacaaccagacattatgtgcttcttgataaaagaagtgaacatcaccttataatgtagtcttacccttactcacctaaaaaagaacctgaagctgaaactctagagccaacttgcaatttataggggacagatgaacatgttaaattataccatgggatacaaaagcaaaattcaaactatgggaaaacgtgaaagacaaataaccttgtttcttaaacaataaattatgaagaataaaataacagatagagtgggaacttataggaccaaaagaaacataaaagatatatcaatcaaccacaatgtgcagtaccttatttggatcccgagttttaaaaaaaattgtaacatttgcaattagtagaaatttgaacacatatttaataatttgtgataatggttttgtggctaagtttaaaaaatgaaaggccccaatcttcagaaatctactctgaaatatttacaattacatatttaacaagtatataaaagtataaccatatctgggatttgctttcacttagtaagagatggtagctggagagatgtatggatgagataagattggccacaagctgatggttactagaactaggt

SEQ ID NO: 3216 - DNA, 176 bp, Homo sapiens
  source 1..176: mol_type = other DNA
gaacctttttgagtgccaacatgacactcaaaggaaatgctcatggaacatttcagatttcagatttgggatgcccaactggtaagtataatgcaaatattccaaactttgaaaaaaattatgaaatctgaaatacttcttgtcccaagcatttttggaaaagggatactcaacct

SEQ ID NO: 3217 - DNA, 93 bp, Homo sapiens
  source 1..93: mol_type = other DNA
tttatggcagatactatatctttttcatctttgcatttctaacacaggtgtcttacaagtatcaagaacttactatatgtggttgaataaaca

SEQ ID NO: 3218 - DNA, 5866 bp, Homo sapiens
  source 1..5866: mol_type = other DNA
aaatgaaagataggaggcaggactaacttccagctcccattctgacagacagagtggtgtgtagagactcacattgtgaatttctgctccaagaaccacacaggaacataccagggaagccaacagaatccatagaccttttgaaagggtggattgtcactgcaggctccatgggacagcgaggaactgtgagtcggcttactttctcagctgggaggctcgtagcctggggcaaattctcagccttgctcaccagctgcctggaaataaacttggtgctgttgagggggcatggtgggagtgagaccggcctttcacggtgtgagctctgtgggagctgggtgaggcctgtggctgccagcttttcccacttcactggcaacctgtgtgatgcagcagaggcagctataatccccctgggaacataactccattggcctgggaaccacacccacatcccccacagcagatgcagcaaggagagtctgagctcagacatgcctaacactgcccctacctgatggtctttctctagccaccctggtagctgaagagaaaggacataacctcttgggagctctatggccctgcctacaacctgagaaacctgaatacgtatccaaaggcaacactagggaaaatttgtatcctccctatactaccgcagctgatgagctcttgaaagagccacctcctggctggccaccaaccaacacaaaactggtgcactcaacaaaatacaacttagaaccctcacagagtccacttcactttcctgctacctccaccagagcaggtgctggtacccatggttaagagacctgaagatgtatcacatcacaggattttttgcagacactccccagtaccagcccagagcctggtagctccactgggtgtctagacccagaagagaaataacaatcactccagtttggctctcagaaagccccatccctaagggataggagagagcatcacatcaagagaggagcccgagggacaaaagaatctgaagagcagcccttgagtcccagaccttttctctgacatagcctacccaaatgagaaggaaccagaaaaacaattctggtaacacaacaaaacaaggttttttaacaccccccaaaaaatcacactagctcattaacaatgaatccaaaccaagatgaaatctctgaattgccagaaaaataattcagaaggttgattattatgctagtcaagaaggcaccagagaaaagtgaagctcagcttaaagaaataaaaaaaaaaggatacaggatatgaatggataaatctccagtgaaatagatagcatagattaaaaaaaatcacaacttctggaaatgaaggacacacttagagaaatgcaagatgcatgggaaagtctccacaacagaatgaaacaggtaggagaaagaacttcagagcttgaagacaaggctttcaaattaacccaatccaacaaaggcaaagaaaaaataatttaaaaaatgaataaagcctccaagaagtttgggatcatgttaaatgaccaaacctaagaataattggtgttcctgaggaagaacagaaatctaaaagtttggaaaatgtatttgagggaataatcaaggaaaatgtccctgacctagctagagattcagacatccaatacaagaagctcgaagagtacccaggaaattcatcacaaaaagatcattgcctgggcacatagtcatcagcttatctaaagtcaagacaaaggaaagaatcttaaagctgtgaggcaaaagcatcaggtaatctataaagggaaacctatcagattaacagcaaatttctcagcagtaactctacaagctagaagggattagggtactatccttagcctccttaaacaaaacaattatctgtcaagaattttgtatccagtgaaactaaccttcataaatgatgggaagatacagtatttttcagacaaaaaaatactgagagaattcaccactacgaagtcagcactacaagaactgctaaaaggagctctaaatcttgaaacaaatcctcaaagtacaccaaaatagaatctccttaaagcataaatctcacaggacctataaaacaataacacaatgaaaaaaagaaaacaaggtatacaggtaacaaatagcatgacgaatagaataggacctcacatctcaatactgacattaaatttaaatggccaaaatgctccacttaaaagatacagaatggcagaatagacaagaattcatgaaccaagtatctgctgtcttcaagagactcatctgacacataaagactcacataaacttaagggaaaggggtagaaaaacatattccatgcaaatggacaccaaaagcgatcaggaggaactaatcttatatccgacaaaacaaatttaaaagcaacagcagttaaaaaagacaaagagggacattatataataaaaaaagactagcccaacaggaaaatatcacaatcctaaatatatatgcaagtaacactggagtttccaaatttataaaacaattactactagatctaaaaaatgagatagatgtcaacacaataatagtgggggacttcaatactccactgacagcactagacaggtcatccagacagaaagtcaacaaagaaacaatgaacttaaatgttaccttagaacaaatggatttaacagatatttacagaacattctacccaacaactgtagaatatacattctattcatcagcacatagaacattctccaagatagatcatatggtaggccacaaaacaagtctcaacaaatttaagaaaattaaaattatagcaagtactttctcaaacaacagtggaataaaattgaaaatcaactccaaaaggaacccttaaaaccatgcaaatacatggagattaaataacttgctcctcaatgattgttgggtcgaaaatgaaatcaataatgagatttaaaaattctttgaactgaacgataatagtgacacaacctatcaaaacatctgggacaccaaaagcggtgctaagaggaaagttcgtacattaaatgcctacatcgaaaagtctgaaagagcacaaatagacaatctaacataaaatcacacctcaaggagctaaagaagcaagaatgaaccaaacccaaacccagcagagaaaaagaaataaccaagatcagagcagaactaaatgaaattgaaacaaaaaaaaatacaaaagataaatgaaataaaaagctagttctttgaaaagataaatagaattgatagaccatcagcaagattaaccaagaaaagaagagagaagatccaattaagctcaattaaaaatgaaatgggggatattacaaccaatacaacagaaatacaaaagatcattcaaggctactacaaacatctttacatgcataaactagaaaacttagaggagatggataaattcctggaaatatacaatcctagattaaaccggaaagaagcagaagccctgaatagagcaataacaagcagcaagatggaagtggtaatttaaaagttaccaaaaaaaaaaaaaaaaaaaaaagtccaggaccagaagaattcacagctgaactctaccagacattcaaagaagaattggtaccaatctcaatgaaacaattccaaaagacagagaaagaggaaatcctccctagatcattctgtgaagccagtatcaccctaataccaaaacaaggaaaacacataaaaaaaaaagaaaagaaaaccatagaccaatatcctgatgaacatagatgcaaaaatcctcaacaaaatactacctagacaaatccaacaccatatcaaaaagataatccaccatgatcaaatgggttttcatatcagggatgcagggagagtttgacatatgtaagtcaataaatgtggtagaccacatgaacagaattaaaaacaaaaatcacatgattatctcaatagacacagtaaaggcatttgacaaaatccagcatctctttatggttaaaaccctcaaaaaatcagcataaaagggacataacttaaggtaataaaagccatctatgacaaaaccacagccaacattataccaaatagggaaaagtagaaagcattccccctgagaactggaagaagacaaggatgcccactttcacccacttctatttagcctagttctggaagtcctagccagagcaatgagacaagagaaagaaataaagggcatccaaatcagtaaagaggaagtcaaactgtcactgtttcctgatgacacggtcgtatacctacaaaaccctaaagagtcatcccaaaagctcctagaactgatatatgaattcagcaaagtttcagtttacaaaattaatgtacacaaatcagtagctctgctatacaccaacagtgaccaaactgagaatcaaatcaaaaagtcaactcttttacaatagctgcaaataaaataaataaaatacttaggaataaacctaaccaaggaggtgaaaggcctctacaagggaaactataaaacacagctgaaagaaatcatagatgtcacaaacaaatgaaaacatattccatgttcatggttgggtaaaaccattattgggaaaatatcatactgccaaaagcaaactacaaattcaatgcaattccatcaaaataccatcaccattcttcacagaactagaaaaacattctcaaaattcatatggaacctaaaaagagcccacatagccaaagcaagactaatcaaaaagaacaaatctggaggcatcacactgccctacttcaaattatgctataaggccatagtcaccaaaacagcatggtactggtataaaaataagcatatagattaatggaacagaatagacaacccagaaataaagccaaatacttacagtcaactgatctttgacaaggcaaacaaaaacataaagtgaggaaatgacaccctattcaacaaatggtgcttggataattggcaagccacatgtagaagaatgaaactggatccttatctttgaccttataaaaaaatcaactcaagatggttcaaagatttaaatctaagacctgaaaccataaaaattctacaagataacattggaaaaacccttctagacctcagtttagacaaatactttataacgaagaacccaaaagcaaatgcaacaaaaacaaagataaatagatgagactcaaactgaaaagcttctgcacaggaaaagaaataattagcagagtgaacagataacccacagagtgggagaaaatttttgcaaactatacttctgacaaaggactaatatccagaatctacaaagaacctaaacaaatcagcaaggaaaaaacaaacaatcccatcaaaaagtgggctaaggacatgaatagacaattctcaaaagaagatatacaaatggaaaaaatgaaaaaatgctcaacatcactaattatcatggaaatgcaaatcaaaacacaatctacaatgcgataccaccttactctggcaagaatggccatagtcaaaaaatttttaaaaactaatagatgttggcatggatgtggtgaaaagggaacacttttacactgttggtgggaatgtaaactaatacaaccactatggaaaacagtgtggagattccttaaagaactgaaagtagatctacaatttgattcagcaatcccactactgggtatctgcccagaggaaaagaagtcattatacagaaaagatatttgcacatacatgtttatagcagcacaatttgcaattgtaaaaatacagaaccagcccaaatgctcctcaaccaatgagtagataaagaaaatgtggtatgtgtatatatatatatatggaata

SEQ ID NO: 3219 - DNA, 365 bp, Homo sapiens
  source 1..365: mol_type = other DNA
tgatagatgcaagaggaggccaaggactccctgcaaaacctcaacttcaagcctaaaacagcctgaaggttgaaaaactggactgctggctccagatgaagtccaccctttcccaactgattctttctgaataatgcccacctgcacactcagaggatggggtggggccatgcaagctccctgccgggaacccagcctcttgagctcctatgtggtggggcaggagccagttcacaggcttccctctcactctgctgagagtttttctcttttccttttttttgcccaataaattccatttttctcacccttctgtgtgtccatgagcctaatcttttctgattgtgtgacaagaacctgtattt

SEQ ID NO: 3220 - DNA, 293 bp, Homo sapiens
  source 1..293: mol_type = other DNA
gccaggagcggtggctcacacctgcaattcccagcactttgggaggccaaggtgggtggatcacctgaaattgggagttcgagaccaccctgaccaacatggagaaaccctgtctctactaaaaatacaaaattagccgcgcgtggtggtacatgcctgtaatcccagctactcgggaggctgaggcaggagaattgcttgaaccctgaaggcggaggttgcggtgagccgagatcgcatcattggactccagcctgggcaacaagagcaaaactccgtctaaaaaaaaaaaa

SEQ ID NO: 3221 - DNA, 277 bp, Homo sapiens
  source 1..277: mol_type = other DNA
ggctgggcacggtggctcatgcctataatcccagcacttggggaggccgaggatctcctctctggtggatcacttgagggcaggagttaagagaccatcctggccaacatgatgaaaccctgtctctactaaaaatacaaaaagtagctgggcgtggtggcatactcttacaatcccagctacttgggaggctgaggcaggagaatcacttgaacctaggaagcagaggttgcagtgggccaagatcacaccactatactctagcctgggcgacaga

SEQ ID NO: 3222 - DNA, 129 bp, Homo sapiens
  source 1..129: mol_type = other DNA
gctggctgtggtgactcatgcctgtaatcccagcactttgggaggctgaggtgggaggattgcttgagtccaggagtttgagaccagcctgggcaacatggcgagaccctgtttctacaaaaagaaaaa

SEQ ID NO: 3223 - DNA, 207 bp, Homo sapiens
  source 1..207: mol_type = other DNA
cctggccaacatggtgaaaccccgtctctactaaaaataccaaaattagccaggcgtgatggtgggcgcctgtaatctcagctacttgggaggctgaagcaggagaactgcctgaacccaggaggcagaggttgcggtgagtcgagatcgtgctactactgcctgggtggcaagggtgagactccatctcaaaaaagaaacaaaaaa

SEQ ID NO: 3224 - DNA, 106 bp, Homo sapiens
  source 1..106: mol_type = other DNA
gagcttcccaaactttttcaagtcatggcatacacaagaaatgatatctgtacatacacgggtaaaaaaatgcaagagattgctctcagctggatccccaagggct

SEQ ID NO: 3225 - DNA, 311 bp, Homo sapiens
  source 1..311: mol_type = other DNA
tcatgcctgtaatcccagctacttgggaggctgaggcaggaggactgcttgaggacaggagttcaagaccagccccagcaacatagtgagaccttgtctctacaccaaagaaaaaaaaagaaaacattagctggggatggcagcatccacctgtaagtcccagctacttgggaggctaaagcaggaggatcacttgaacccaggagtgcgaggttacagtgagctatgatgatcataccactgcactccaccctgggcgacagaggaaattctgtctctaaaaaagttttaaaaaatataaaaaataaaaa

SEQ ID NO: 3226 - DNA, 231 bp, Homo sapiens
  source 1..231: mol_type = other DNA
agaccatcctggctaaaatggtgaaaccccatctctactaaaaacacaaaaaattagctgggcatgttagcgggtgcctgtagtcccagctactcgggaggctgaggcaagaaaatggcgtgaacctgggaggcggagcttgcagtgagctgagatcgcgccactgcactccagcatgggggatagagcgagactccgtctcaaaaaaaaaaaaaaaaaaaaaaaaaagaa

SEQ ID NO: 3227 - DNA, 932 bp, Homo sapiens
  source 1..932: mol_type = other DNA
atgtaagaagcttaaggttaccacttcacgctaataacaaattaaaaactgaacaacctgagaaaacaacttttcttgtatatagcagagaatcgaggtcacagggcaaatctctgcccccataattggagataggcagatagagagaatcacaacttaactggtgcagaaacctcttcaggaaccagtgcgagggtagtaggaaaacctgacctgtagttgacaaattactggagactcagagtggacaagtgtcagagttaagaactccatggtcccccataattttgtgagttttacctccaggagctctaccaggttctcccagtgaatattggaaaaaatcttctcatgcttccagcagaagagaggggtggaaagtaaccattaaatatgccagagcattctgtttttcttagcaaggcctgcagtcaagagaaacttttttaccaaagcccagtctgcctgggggaaggcaaatacccaactccagctcctccagccatgttatcacactggaggggaggactaaggcacactggtgaagtttacaacccaaggctaggctaagccaaagactgtgagttaatcttatgactacagaacactttgcctcccacaacaccttaccactacattactaaaggtctatttactgcagttccctttacccagtaaatatgtactactttcaacaaaatattacgaggcatactaaaaggcaaaaaaacagtttgaagaaactgaacaagtatccaaaccgtatttctagcaaggaatattggaattatcagaccaggaatttttttaaactatgattaatgtgccaagggctttaatgggaaaagcagacaacgtgctagaacagatataagcagagaaatggaaattgtaaaaataaaatgctagagactaaaaacattgtaacagaa

SEQ ID NO: 3228 - DNA, 88 bp, Homo sapiens
  source 1..88: mol_type = other DNA
taataataactgtgaaatactgcaacatcttgaagtactttataaatgaccaaaaacaggtaaaattttgttcagtataacttcagtg

SEQ ID NO: 3229 - DNA, 303 bp, Homo sapiens
  source 1..303: mol_type = other DNA
ccgggcgcggtggctcatgcctgtaattccagcactttgggaggcagagttgggaggatcacctgatgtcaggggtttgagaccagcctggtcaacattgcaaaaccttgtctctactaaaaatacaaaaattagctgggcatggtggcgcatacctgtaatcccagctacttgggaggctgaggcaagagaatcgcttgaacccaggaggcagaggttgcagtgagctgagatcatgccattgcactccaacctgggtgacagagtgagactccatctcaaaaaaaaaaaaaaagagagaaa

SEQ ID NO: 3230 - DNA, 199 bp, Homo sapiens
  source 1..199: mol_type = other DNA
gtccaacagaactgtgatgaaatgttctatatccatgctcgccaatacagtagaagtagaccctagccacaggtgggtagtgagcatttgaaatgtggccagcccaattgaggaattgagttttaaattttctttgattttaatggatttccatcaaaatggccacattttgttagtggctaccatattagacagcaca

SEQ ID NO: 3231 - DNA, 551 bp, Homo sapiens
  source 1..551: mol_type = other DNA
gtgatagttaattttatgtctcaacttgactgggccatagcacaccgaagcattcggttgaatattaatccggatgtttctgtgaggttgtttctggatgaaatgaacatttttgtagactgagtaaagtagtttgccgcctctcccgacccaacaatgtgggtggggctcatccaatcagttgaaggcgttactagaacaaaaatgctgaccttttcatgagtaaggggggaagtcctcctgcctgactacctttgaactgggacatgtgccttttttttctgccttcagactcaaactaaacgtcagcttttcccggctctcaagcctgctggtccctgaactaaaactcacattatcaactctactggttcttaggcctttggagtcagactggaactacagcattgactcttccggaactccagcttactgactacagatcttggaacttttcagcttccacaaccatgtaagccaattcctttctaataaataagtctctctctgtatatacatcctactggttctgtttctctggagaattccaa

SEQ ID NO: 3232 - DNA, 5789 bp, Homo sapiens
  source 1..5789: mol_type = other DNA
tctcctggactcagatcccagccatgtctacacagctccagtactctccttgggtcttccccagctccgcttagccagaaagctccatcaaaattggagccctcatgagacttgtggcaaacttgggcatagcacttcctctagcgttgggacaggtgcaatgatcacagcctctgggaacataacagtcaggccgcttagaatttctagaaggccttctgaagaaaaacagacacaaacaaatccagattgcaaagactgaaataaataccttatctttcaatgtggagatattgccacaaattaagaacatttaatatgaccttatcaactggacaaaataaggcatcagaggccaaccataaagtaatgaagatatgttaactctcagacaaagaagtccaaatagctgtttcaaggaaattcagtgaactaaaaaagaacaaacaaacaaacaaaaaaccaatttttgaaaaaaataacagagatattgaaataagtttaaaagtcaaacaaatcttggaggttcaaaatacaatgaatgaaataaaaaatacagtggagggcaccaacagcagaactgatcaaacaggagaaagaatcggtgagctcaaaacaggctatttaagaatacactataaaaggagaaaagagaatgaaaaggaatgaaaaaagcttacaagatctatgggacaaaatcagaagataaaatacttgggttattggagttaaagagggaactgagaaagataaaagggtagaaagtttatttgaagaaataataacagaaaaatttccaaacctggagaaagatataaatatccaggtacaggaaagtcaaaagtcaccagtcagattcaacctaaataaacatatgccaagagatatcctaatcagactctaaaaaatcaaagacaaagagaagattctgaaagcatcaagagaaaagaagcaaataatatagaagggtgatccagcatgcctggtagcagacttttcagcagaaatcttacaggccaggaaggagttagataaaatatacagagtgctgaaggaaaaaaataaaaaataaataaactgtgaatactgtattgagcaaagctatcttttataaatatagaagatataaatgctttcccagacgaacaaaaactaagggaatttatcactaccagaacattcttacaagaagtgctaaagggagttctttaaactgaaagaaaaggatgctaacatgattgttacactaatattgtaattatggtatgtaaaccacttacatccttcataagaagactaaaagacaaaactcttaagataatagtaactacaacaatttttaaagaaatgggcaatacaaaaatgtaaatggtgacgccaaaaatttaaaatatgagaagacaaagaagttaaaccgtacagggtttgtttgtatcttttttgcaatcaataagttaagttggtatcagttttaaataacttcttataactacagaatgttttttctaattctcataatagcgtttttttctaattctcataataattacaaagcaaaaacctgtaatacatacactaaaaaaaaaaattaaaacatattaccagagaaaatcacttagccacaatggaaagtagtaagaaagaaaggagttaaaaaaaacaactataaaataagaaacaaaatggtagtagtaaacctttaccaacccctaataacactgaatgtagaagaactgaatgctctaattaaaaaaatagagtgactgaattcattaaaaaacaagtctcaactatacactgtctacaagaaactcacttgacctctaaagacacacatagactgaaagtgaagggacgggaaaaagtattccatgtaaattaaaatcaaaaaagagcaagactagctacatttatatcagctaaaataaattttaactcaaaaactaaaaagaggcaaagaatgtcattatagaatgaaaaaggagtcaattcagcaggagtacatcacaatatatatacacccaacactggagcacccaaatatatacagcaataatagatctaatggggagagaaagactgcaacacaataatagtaggggacttcaacacttgactttcatcaatgtacagatcacccaggcagaataccatcaagaaacattgaagttaaattatactctaaaccaaatgaacccaaaagacatttacaaaacattttatccaactattgcagaatacattcttcttattagcacctgaatcattctccaagatagaacatatgttaggccacaaaacaagtctccacacaaaatcatatcaaacatttttatagacacatccaaaactagaaatcaataacaagaggaaatttggaaattgtaaaagtatataaaaattagcaccttcctgaatgatcaatgattcaatggagaaaataaaaagaaaatttaaaaatttcttgaaacaaatgaaaatggaaacacaatatatcagagcccatgggatccagcaaaagcagtactatgagaaaagtttatagcaataaatgcctatactgaaaaatataaagatttcacataaacaacctacctacacctcagaagcctagaaaagtaatgataaaccaaacccaaaattagtagaagaaaagaaataataaagataaaagcagatataaaaaattgagaatagaaaacaatataaaatctctatgaaactaagttcatttttatgaaaagatcaaacaaaactgacaaaattttagctatcctaattttaaaaagagaagatatcaataattaaatcagaaacaaaaaaggagatatatcaactgataccacagaaatacaaagaattattaaaaactgttatgaacaaatacatgccaacaaattagaaaacttaaatgaaaaggatacatttctggacacttataatctactaagattgaaccatgaagaaatagaaaacctgaacagaccaacagtggctaacaatatcaaaacagtagtaaaaagtctcccctcaacgaaaagcccaggaccaaatggattcactgctaaagtctaaaatcatttaaataaaactaacaccaatttgataaaggccatatatgattaattcaccactcaaactattttacaaaattgaagaggagggaagacttccaaacttactctataagaccagcattcccctgataactaaaaacagacaaggtcgcaacaacaacaacaaaattaatgggcaatatccttgataaacatagattcccaacaaaataccagcaaaccaaactcaacaacacactaaaaagatcgttactgtgatcaagtgagattcatcccagggatgcatggatggttcaacgtacaaaaatcaataaatgcaatacatcacatcaacaaaatcaaagataaaaccatattatcatttcactagatgctgcaaaagcatttgataaaattcaacatccttcatgataaaagttaacaaattgggtacaaaaagcaaaaagaaaatattgcagcacagtaaaggccatatatgacaaagccactgccaatgttatactgaatgggaaaaattgaaaacctttcactaagttctgcaacaaataagaatacccactttcaccacttttatttaacatagtactggaactcctagccagagaaattatgcaatagaatgaaataaaaggcatccaaataagcaaagaggaagtcaaattattctagtttgcagatgacatgattttttatgtagaaaaatctaaatactccagcaaaaaagctcttaggactgataaatgaattcaggaaattaacaggatataaaatcaatgtacaaaacaactagtagtattctacacactaagagcaatcagtatgtaaaataaatcaagaaagtaatcccatttacaatagctacaaaaactaaaatctctaagaataaatttaaccaaagaaataaaagatctctacaaggaaaactataaaacactgatgaaataaattgaagaagacacaaaaaaattggaaagacatcccatgttcatggcttgaaataattagtattgttaaaatctctgtactacccaaagtgatctagagatttaattcagtctctatcaaaattcccctgacattcttcacagaaataagaaaaataatcataaaattcacaagtaaccagaaaagaccctgaatagctaaagcaattctgagaaaaacagagcaaaaccaaaagctggaggcagcacattacctgattttaaagtatactacaaagctataatagccaaaacagcatggtactatcataaaaacagacatacagaacaatggaacagaatagagaactcagaaataaatccacacttagagtcaactgatttgcaagaaaggtgcatttgggaaaggagagcctgtttaataaacggtgctgggaaactggatatccatatgcagaaaaatgaaactagatcctcatcttttgccatttacaaaaatcaaccccaaatggattaaggacttaaatctaagacctgaaacttgatactactagaagaaaacattggggtaatgctacaggtcattggccagggcaaagattttcggggacagacctcaaaaacacagacaacacaaaccaaaattcacaaattggattacatcaaactaaaaaccatctgcagagcaaaggaagcaatgaacataggaaagcaacaacctactgaatggggaaaaattgcaaactacccaaaaatagattaataatcagaatatataatgtattaaaacaactcaatagcaaacaccaaataatatgattaaaatatggtcaaaagacttgaatagacatttctcaaaagacatacaaatggccaacaaatttatgaggaaatgctaaacattaagaaaaggagatatcatctcaccccagttagaaaagctattatcaaaaagacaacaacaacaaaaatatcagatgctggcaaggatatggagaaggggaacatttatacagtgttgttggcaatataaagaagtatagccatcatggaaaacactagggaggttcctcaagaaatgagaaatagaactactgtatgatccagtaattccactactgagtacttccaaaaaaaggaaattggtatattgaagagatatttgtattctcatgtttactgcagcactattcacaatagtcaagatatagaatcagcctcagtgccactcgatgaataaatagataaaaaatgtggtatgcatagacaatggaatatcattcagccacaaaaaagaatagaatcctgtcatttgcagcagcatggaaggaacttatttcattctgttaagtgaaataagccaggcatagagagacatatattgcattctctcactcatttctggaagctaaagaaaagtggatctcatgaaagtagagactaaaatggtggttaccagaagctgggaggggaaaggtgttggacagatgaagacaagttggttaaaattggatacaaatatacagtcagatagaaggaataagttctcatatttaatagtacaactgggaaattatagttaatgataatttattgtaaattaaaatagaagggaataactgtaatgttcctaacacaaagaaaagataaatgtttgaggtgaatgatatctcagttaccctggtttgatcattatacattgtatacatgtatcaaaatattgcatgtgtccctaaaatatgtactactattatatatcagtaaaaaa

SEQ ID NO: 3233 - DNA, 528 bp, Homo sapiens
  source 1..528: mol_type = other DNA
ttgattctcattattcaaggtagttacgttctataaagtcactgcgaacactgaattagcaaatatagaacctaggggaaatacaaggctagatttctgcaagccactggtcacattttcatcaagcagtcaacatgtaaatttctgttgtaaagacaccttatttaatataatcgattcattaacattgaagtcatgaccaacaacactgtaactcatgcctgaatgaagcttatctgacacataagcttcataaggcacacaacagcctttttacccttaggaacagctttttgcccttagcactatgcttgggggccattttaaacagtgaaatcaaaaaaagaacagaaatgcaaaaaccatggcattagcgtaaaaaggacacgtttatagtatgaaagctggaacatggccttgttcaacctcagctcagaatatgtgtacagcaagttttttgctgtaccacaaaattttaggttaggcaaattcacaaatacggaatccatgaataacgaggatcaactg

SEQ ID NO: 3234 - DNA, 3145 bp, Homo sapiens
  source 1..3145: mol_type = other DNA
tttggtgccgtgactcagatcggggggcctcccttgagagatcaatcccctgtcctcctgctctttgctccatgagaaagattcacctatgacctcaggtccgcagaccgaccagcccaagaaacatctcaccaatttcaaatctggtaagcagcctctttttactctcttctccaacctccctcactatccctcaacctctttctcctttcaatcttggtgccacacttcaatctctcccttctcttaatttcaattcctttcattttctggtagagacaaaggagacacattttatccttggacccaaaactccggcgccggtcatggactagggaaggcagccttctcttggtgtttaatcattgcagggatgcctctctagttattcactcaggtttcagaggtgtcagaccacacagggatgcctgccttggtctttcactcttagcggcaagtcctgcttttctgggggaggggcaagtaccccaaccccttctctccatgtctctaccccttctctgcctttctggggggcaagaaacccctgaccccttctccttcactcttagtggcaagtcctgcttttctaggggagggggaagtaccccaaccccttctctgtgtctctaccccttctcctcctttctggggggcaagaaacccccaaccccttctccttcacccttagtggcaagttctgcttttctgggagagtggcaagtaccccaacctcatatctctgcaccccaatcccttatttccatgccccgactacttatatctctgcaccctgatcccttatttccatgccccaacctcttatatctctgcacccctatcctttatttccatgccctgacctcgtatctctgtgccctgacccctttcctgcttttctggagggtaagaacccccgaatcccttccctccatgtctctactctcccttctctctggacttgcttccttcactatgggcaaccttccaccttccattcctccttcttctcccttagcctgtgttctcaaaaacttaaaagctcttcaactcacacctgacctaaaacctaaatgccttattttcttctgcaatgccacttgaccccaatacaaactcgacagtagttccaaatagccagaaaacggcactttcaatttttccatcctgcaagatctaaataattcttgtcataaaataggcaaacggtctgaggtgcctgacgaccagacattcttttacacattggtcccttcctagtctctgtgcccgtgcaactcgtcccaaatcttccttttttccctcccgcctgtcccctcaatcccaaccccaagcttcactgagtctttctaatcttccttttctacagacccatctgacctttcccctcctccccaggctgctcctcgccaggccgagctaggtcccaattcttcctcaacctccgctcctccaccctataatctttttatcacctcccctcctcacacctggtccggtttacagtttcattccgtgagtagccctcccccacctgcccagcaatttcctcttaaaaaggtggctgaagctaaaggcatagtcaaggttaatgctcctttttccttatcagacctctcccaaatcgtgagcatttaggctctttcatcaaatatgaaaaacccagcccagttcatggctcattcggcagcatccctgagacgctttacagccctaaaccctaaaatgtcaaaaggccgtcttattctcaatatacattttattacccaatctgctcctaacattaaataaaactcgaaaaattaaattccagccctgaaaccccacaacacgacttaattaacctcaccttcaaggtgtacaataatagaggcatccaagtagcaacatatttctgagttgcaattccttgcctccactgtgagacaaaccccagccacatctccagcacacaagaactccaaacgcctgaaccgcagtggccaggggttcctccagaacctcctcccccaggagcttgctacaagtgctggaaatctggccactgggctaaggaatgcccagagcccaggattcctcctaagccatgtcccatctgtgcaggaccccactgaaaatcagactgttcagctcacctggcagccactcccagagcctctggaactctggcccaaggctctttgactaactgcttcccagatctcagcttagcagctgaagactgacactgccagatcgcctgaagcctacaagaccattacagacactctgggtaactctcacagtggaaagtaagtccgtccccttcttaatcaatacggaggctacccaccccacattaccttattttcaaaggcctgtttcccttgcttccataactgctgtaggtattgacggccaggcttttaaacctgttaaaactccccaactctggtgccaacttagacaatattcttttaagcactcctttttagttatccccacctgcccagttcccttattaggctaagacattttaactaaattatctgcttccctgactgttcccagactacagccacacgtcattgctgcccttttccccagttcaaggcctcctttgcatcctcctctcatatcaccccatcttaacccacaagtataagatacctctactccctccttggcgaccgatcatgcaccccttaccatctcattaaaacctaatcacccttacccccctcaatgccaatatcccatcccacagcacgctttaaaaagattaaagcctgttatcacttgcctgatacagcatggccttttaaagcctataaactccccttacaattcccccatttcacctgtcctaaaaccagccaaggcttacaggttagttcagaatctgtgccttatcaatcaaattgttttgcctatccaccccgtggtgccaaacccatatactctcctatcctcagtacctccctctgcaacccattattctgttctggatctcaaacatgctttctttactattcctttgcacccttcatcccagcctctcttcgctttcacttagactgaccctgacacccattaggctcagcaaattacctgggctgtactgccgcaaggcttcacagatagcccccattacttcagccaagcc

SEQ ID NO: 3235 - DNA, 336 bp, Homo sapiens
  source 1..336: mol_type = other DNA
gttgtgaaactctgccaagtggttcaaatcagatccactacctgcttttgtatagccagtgagttaagaatttttttacactggtaagtgtttggggagaaaacgttttaaaagaacagaatttcatgatatgggaaagttgtatgaaatttacattttggtgtccataaatgaagtttaattggaacacagccattctcattcctttgtgtattgtctgtggcagcttttgtgctacaagagcggtagttgattagttgtgacaaagaccgtatttctagaaagattgaaatatctactctctaggcccttatcaaaaatgtttgccaatatctg

SEQ ID NO: 3236 - DNA, 420 bp, Homo sapiens
  source 1..420: mol_type = other DNA
tcaaccacgccaagcagagtctgactgcagtgcccttcttcctgctgtttcatctgcctgtgatcctcttctccagacacctctgttgcttgttccttcactttctccaggtctctactcaaatgtcattttattagagaggccttccctgaccaccttatagaaaataacaccccaccctctccattccctgttccccttaccatgtttaatttttttcccgtagcattcatcaccatctaccatccatccatccattcatcattcattcattcatttgttcacttcagtctcttttcactagactgtgccttgtagataaataaggattctgtttttgttgagtactccatccttagcacctaaaacaatgttaaaacaactagatgatactaaaagcatattttttgaatgcatgaa

SEQ ID NO: 3237 - DNA, 721 bp, Homo sapiens
  source 1..721: mol_type = other DNA
ccaagaaccaactaggagtcacccatgacatcatctcctgaatttcatcaccaagcccagctgatcctatttcctaaatggttcctgatttctctcttctgttttctgtctctgccaccactgtcctagcacaggcattgcacatctctcatatgaacgcctgcaggactgtcccttgatgttatccttgcagcccctacattcctactgtgcagccagtaaagtcatattaaaatgcttatttgatcatgtctctctcctgtttaaaaccttttgaatgatttcccatgtgatcaagagtaaacttagcctacaaggcccaggatgatctgaacacaaccttcttcttagtgctgttctttctcactctctgggatccagacatactgctttctctttacacagaaaacctaatttgcttcctcctgcctcaagacctttgcacattcctgctcctggaatgttcttctcctgttattaactccatgtcactttctcacaaaactgttcttcatcctccagaagatcccaggccccgtttgggctttcatacccccggcacattctggtggggtgctaaactcagattatagtgatacacattggttgaataatatatttatcagactataagctccatgaggccagagacttgtctactttgcttaccacagtattcccagtaactagcacagacctaccaaagactggctgctcaata

SEQ ID NO: 3238 - DNA, 276 bp, Homo sapiens
  source 1..276: mol_type = other DNA
cctggcactttgggaggccgaggtgggtggatcacgaggtcaggagatcgagaccatcctggctacaatagtgaaaccccgtctctactaaaaacacacaaaaaattagccaggcgtggtggcgggtgcctgtagtcccagctactcgggaggctgaggcaggagaatggcgtgaacccgggaggtagagcttgcagtgagccgagattgcgccactgcactccagcctgggcaacagagcgagactctgtctcaaaaaaaaaaaaaaaaaaaaaa

SEQ ID NO: 3239 - DNA, 444 bp, Homo sapiens
  source 1..444: mol_type = other DNA
tgtgggactagacctctggcaggtccaaggccctaccctgctatggcgatagtccacatgggaaagagaactcaggcaaacagacagggaaatagtgaaattgttaccagttctttgcatcaggcgggtagccagaattttgtcaggaggagccacggaggtttaaaacccatgaaactagaaaaaggagcttttccaaaattttgataagattctcacctcaagaagaggacagaagcagcaatataaggctctttatgggcctggatagccagggcaggttggccctctcccttggaacactgcaatatcatcagtcttgtataatcagcgtgtgctattgtaagcttttcctttacctgcctgaaaataacttgttcttgttctgtatctgttggcattttctgtcaaatcttatcaccaccgctttgttgaccagcaagc

SEQ ID NO: 3240 - DNA, 296 bp, Homo sapiens
  source 1..296: mol_type = other DNA
ggccaggcatggtggctcatgcctgtaatccagcactttggaaggcctaggcaggtgaatcacttgaggtcagcagttcaacaccagcctagtcaacatggtgaaaccccatctctactaaaaatacaaaaaattagccagacatggtggcacatgcctgtaatccattactggggaggctgaggcaggagaatctcttgaacccaggaggcagaggttgcagggagccgagatcgtgccattgtactccagcctgggcaacagagagactctatctcaaaaaaaaaaaaaaaaaa

SEQ ID NO: 3241 - DNA, 588 bp, Homo sapiens
  source 1..588: mol_type = other DNA
tctagaatgtgtcagggccaaggatatgtaaggattacctttgaaccagatagggactacaactgagaactgttatacagtcattctgactctggccttaggctactggcctaagcagcaagtggactgcttaggccagtaatgagataaagaagactatggggagtggactccaggaaaccaggagtcacacaagtgcaactcacagcatgggaggtcaatggaaagtacccagctgaggagcagcttctgaagagcccacagaaggccccaagaaagagccagttttaagcatataacaggactacggggcataaagcctcttaaaaagaacattaacaaagtaagaatatcccacatttcttttcctaatgggagaggagagagtaagaaattaagactaccacattccccttcctgaaggcaggaaacctgcctgcctgcagcgggagaagcttcagcttggagaagagtttagagttttgattattctttagggctggcttactactttatgatttattatatgtaatttaaagtgattaggtttttctactacctgcaaatgaccagaaaagtcatgagact

SEQ ID NO: 3242 - DNA, 495 bp, Homo sapiens
  source 1..495: mol_type = other DNA
ctgttgattgtctatttaacagccattcccacttcttgcttactaaggcaacaacatcatccatccctacccaaaacaatgtgtctagctgctgaggatggatcatgattattctgagccaatatgccaaccttattcttctatctgtctgtaagtgagctggtgatccaggtatgcccacagagaagtaaactgggaaggaagagcttgagtgcaaaaatggctctgataagagagtgctctgagatgagagaggcttttggccccttccctcccttcttggtttgtgtgctgttctctgaggacatgaagctatgacagtcatcaacaccgaagccaaaatgctgagcacggggaaaaggaagggtgggaggagaaggtctttgattacataattaagctacttgatgcacctgcggtaagactgcaacccatgagtcttctttgtaaatgtccttttagtttaagccactgtgaataagattttctattact

SEQ ID NO: 3243 - DNA, 245 bp, Homo sapiens
  source 1..245: mol_type = other DNA
acaagattcagacacacagagagacactagggatgcatgcacgcagaggaaagaccatgcggagcacagtaagacggtgaccatctgcaagccaagaagagaggcctcaagagaaaccaaacctgtcaacaccttgatctaggatttctggcctcctgaacagagagaaaatacattttttgttgcttaagccatccagtctgtgctgtggtatgtttttatggaagccctagcaaattcataca

SEQ ID NO: 3244 - DNA, 1695 bp, Homo sapiens
  source 1..1695: mol_type = other DNA
ctctggttaaagatgacagattgaacttatatgtttacctgttctctctcctgaaatgtaaaataacagtaatgggatatttaaaaatgcttaatccacaggtggtggcaggatggtagaggtaaaataacaacaaaattttggaaactagaaagcagacggacaaatctacttaatgactaaataataccaaggaaactaagttctaagccaagaaacaacccaatttacattgcagaatttcccaaaggctcaggacattaccaaattagatatctctagaagcgaggataatattgggatgagaaaaggaaatattggtcaaaactctttagattcatgttaaacctttctttatgccacacatcttaagtacctgaacaccactctcccctggcctacagtataaaactggttagaaggtgaagaaatttaagggaaggcttacatatggaagagtaaaacattttacattcgttttgctttcagtgcccaatactggcagccaagtttatacccttcagaaagacaggtgagaaatccttctttggtagtatctaagcagtcctagaaggcttctccacaccagttccttctccacaaccagggccaactctccaggggaaaagactgccagaggcttatcccagtgaaggaagcacattatttctactctgagccaggctaactttccctagccttcccatttcctgactccaacagattcagagagggaggttcttcactgaaatggcccatcctaaagagaagcccagagttggcaagcctcatccactgagcttttcatcacctttagtttctgtttgtaagtgtaaaaatgccaatgatcaacagatatttgagataaaggtttgtgataaaaaacatcaacaaataagaaagaggcaaattgaagacttttcaggagaaaacgacaacaagccattgttgatatcttcagggatgtaaaagattataatggctccaaaacaaaaaagctgtatggcataaaaaaggaatattcacagattaagacctcttaaaaattttgtaaatcaatcaataaaaaattttaatagaaggtttagaatatagagttcaagaaatatctcagaaagaacagtaataatgatagtcgtagaaatagagaattgagaaaatgtagaggaggaaatatcaaataattaacttaagaaactttgccagaatttaaggataggaattttcagattttagaaagcaatttagttcctggtatcctggatgaaaataagtctacacaaggcctacattgtgtaattttagaagactagaagaggaataaaaacttctaaaaactgccaggaaagaaacagctttaataacaaaaaaaaatagttattatatattttcttagcatcataagaaagttaaaaaacaaaattcaaagttaaaaaaaagaaattctaagaaacaaatgatttccaaagaagactcctataaccaggcatggtgttaattaattgaaaggtaagagtaaagagtaattagatatacaaaacctctaaaaatgtaattcacaagaagccactggagtatgtgctctaccaaaacaagaacataaactaaaaaatatgaagacctaggattcagtaacagagaattcagcaatagagaggaacaaagggaatttctagtttaatgtgaagggaaatc

SEQ ID NO: 3245 - DNA, 2033 bp, Homo sapiens
  source 1..2033: mol_type = other DNA
gaatcactagtgaaggtcacaacctcgagacagcccaccaaagaactgagattaaatcataagattataaaatacttcttctcccccacactgtaccaccgcgccacggggccctaatagaacaacggttacagctgaaaagatgcaagacacagactttctctgagtattaattagggacgtcgaaagttaagagtgaagataaaacaaggacaaaggaattaaagacctctggcactatgactactgcaaacattgaacaaaaacacaaatattaaaaacatctaactcctagccaaattaacataaatcctcatattaaggatcatttattcagtttctagtacctgatacatatttggctttcaaggaaaacttacaatgtatgcctaaaccaagagaaaagaaaagaggtaaagcaatcatcagaacaagcttcaggtgtaacacagatgctggaaatatcaaatggggcatttaaaataactgtgattcatgtgttcgttgctctaatggaaaacttagacaacatgaaaaacaggtaacataagcagagaagtgaaatctctaagaaaaaataaagaagaaatactagaaataaaaaagaatctaagagaagttgaagaatatctttgatgggctcatactagacttgacacagtggaggaaagaatcaatgagcaggaagataggacaacggaaacttccaaaactgaaatgcaaagagaatttaaaaagcaaaacagaacatccaaaaaattatatgacaatttttaaaggtgtaaaacatgtataattgtaataatagaaagggaagaaagagagaatggagcagaagatatcctgaaagtaataatgatcaggaactttacaaaattagtgacagacagcaaaccacagattgagggaatttagcaaacaccaaacaggataggtacaaataactaactaaataaataaactaagcatatcatattcaagctgcagaaaaccaaagataaagacaaaatctagaaagaagccagagagaaacactttatgtatagaggaacaaggataagaattacatgaaccttcccatctgaagccatgcaaagaagaagaaagtggagtgaagcatttagtgctgaaaaagagagaaaaacctcataaatctgaattatatacctagcaaaattattcttcaaacatgaaagagaattaaagcttttctcaaacaaacaaaaactgaatgaattcattttcagcagacataagaatgttacataagaaatgttaaaaaaaaattttaggcaggaggaaattgatatatgtcagaaacttggatctacattaaaaaagagcattagagaaggaaagacaatgaagggaaaatagaaccttttatttttcttatacttaattgacctaaaagataactattaaaaaataatagtaataatattttaggtgattatagtacatggataagtaaaatgacagcaatgtcacaagggatgagaaggaggaattgggaatactccgttataaatcacctgtactacatgtgaagtggtatagtgttatttgaaggtagacatcgattagtttaaaatatatactgtaaactctaagctaaacactaattttttaaagaaatatagttgataaactaaaagaggagataaaaaagaatcagataaaatgcttgtttaaaaccagaaaatgcagaaaaaatttgaggaagtgggaaacaaacagcaaatgtaacaaatggaatctaagttacaaattaggtagatattaacttgatatcaataatcattttgtgaatagtttacacagaccaattaaaagactgactgtgagggtggataaaaaaaagacaagacttatgtgtttaaatatagactcaggttaaaagttgaggattggagaaagatatgccatgctaaccctaatcaaaggaaaagtggagtagctatgttaatttcagaagaagccaacttcaggacaaggaataattatcaggggtcaagaaggatattacataa

SEQ ID NO: 3246 - DNA, 6797 bp, Homo sapiens
  source 1..6797: mol_type = other DNA
tttttttttcaaagatgatagattagaggttttcagcacacctcaaccacctagcaacagcaagatagtacataaagatcaactctgtgggctttaattcaagaaagacaacaggaatccactggaatcttgaaggataccccaaagcttgagaggaaaacactggcaaacagcccccatgatggtgtctggttgttcaaagtgagtgaagccccagtatgtgagagagacagagaagctccctttgtgactcacctttacactgggaatccgagcaacccaggtcgagggacaggactttgcctctcccaagccctggaatttacttagggagaggcttgaaaatgctgtgagggaaagacactgggaaaagctgcagacatttccccagatgcagtaggcactggaattgtgctctcccccattgtaagcctggggcaagaagagagctgctacagctacagtttctcctgggtggtgagactcgtagcccaggccagcttagtgacctggaactgatctgcgtgtgccattgctgggtgccccactctgtctccctgagattgtggtgaagctaggccctttctactctactcccaggcagaaattcaggcatctggagcacttgcttgcctgtaccagcagcctgagccacccatccttcttaatccttcctaccacattaattgtggtacagcaagactctctctgctccatgcccgggcatccagagaactggctcacttgtttcagcagcctgaaccacctcacccttactgtgcacagatcttggtacagagggactctctctgttctaagcccaagcagatcttcaagcattaggagcagcctgatcacctggttgaccagcctgggttgcgacacccttcctaagcatagatgtggtgcatcaaggtcctctctgatctatatccaggcagatcctctggcattcagaacacttgtttgcctaactcagcagcctgaacttccccactcttcttgtgcagagatccttgtgcaggagtaccctctctgctacatgctcagcaatatctctcggcattcagagcacttgcttgcttggtccaacagcctgagtcactccacccttcctgtacagagacccctctctgctccatgcccaggcagatctccaaccattcttcaagacaggtaggctccaagcctggtgaagcagactgagtcaccccacccctcctgtgtggagatttttgtgtaggcaggccttccctgttccacactcagtcaggtccacaaggcatctggagtactcactctcttggattaggagtttagaccaccccctatccccatgcagagaacttggagctaaggaagtttctcctgagtgtttgtcacacctctgagtgtcttaggccacccactggcttctttcttggtgctaatactatgcctgccatcagggaacctgcaggtggatgtgccccggtcatcccctcctgttttggctccctgcccacaccacctagggctgagcagggagctcagaccattgtacagtcgtcaaatcagctgattgcctgagacaacagacagcttctgcaaataactaagaatcaagtatatacccagtcacattggctgcagccagctcttacctataagtgacatttatgggcttgtaggatgaactgcccagcccaatagccaatataaagcctgctgaaagatgtgcatagagctataaaaacaatgccaaatgaccctgtccagcattctctacagtcacatctcctagggagggggaaaatagaaagagaaagaaaaataataattaaaaaacaatattatagaagaagaagaaaatcctacttgcatagaaataattacaaaaattagaagtgccagcatctctggatgagaagggaccagcataagaactctgtcaccacgaaaaatctaaatgtagtgacaccaccaaagaattgtactagctctctggcaatgatccctaaccaaattagaaactcagaaatgacagaggaattcaaagaatggctgcaaggaagctcaatgagatccaagacaaagttgaaaatcaacacagagaaatcctctaaatcaatccaggaaatgaaggaagagataaacatcttaaaaagaaataaatctcagtttctggaattgagaaactaatttctgaaataaaaaacttaaggaatttcaaaatataattgaaaactttatcaatagactggaaaaaaaacagaaaaaataatttcagtgcttaaagacaagtctgttaaactaagccaatctgacaaaaaaatttaaaaaaaaatttttaaactgaggaaagcgtttgagaaatatgggattttgtaaagttagcaaacctgttaattattggcatttctgagagagaaagaaaaaagcaaacaacttgaaaaacatatttgaaggaataataaaagaaacttctctaatctttctagaaaggtagacattcagatagaagaaatgaaaagaacacttatgagatactacacaaaatgaatatcaccaaggcatatagtcaccagactgcccaaggtcaatgctaaagaaaaaaaaaaatcttaagggcaactaggttaaaaaaaaaaaaaaaagggggcagatcacatacaaagggaaccccattagggtaacagcagacttctgagcagaaaccttataagccaagagagattgcgagaatactttaagcattctaaaagaaaagacattccaaacaagaatttcatatcccaccaaactaatttcataaatgaaagagaaataaaatataaccaagctctaagggaatttgttgccactagaacagccttacaagagatcctgaagggggttctaaacatacaaacaaataaatgatacctgctaccaccaaaacacacttaaatacatagtttgtaaaccctttaaagcaaaaatagaataaaacacaatagaaactacaaaacaaccagctaacaacttcacaataggatcaaaacctcatatatcaatattaaccttgaatgtaaatggtctaaatgccccacttaaaaggcacagagtgacaagttggataaaataacaagactcatctttcttctgtcttcaaaagacccatttcacaagtaatgacaacccctggactcaatgtaaagggttggagaaatgtttattatgtaaaaggaaaacaaaaaagagtaggggttgcaattcttatatcagataaagcagacattaaaccaacaacagtaaaaaaaggacaaagaagggcattacatattaacaaaaggttatattcaatgagaagacttatctatacaaaatatctacacacccaaccatagagcacccgtattcataaaaaagtacttatagacctacaaaataacttaaccagcaacacaacagtagtggggaacttcaacaccccactgacagcattagaaagactattgaggcagaaaactaacagtgaaactctggacttcaacttgaaatgtgaccaactagacataatagaaatctacagaatactccaaccataaaccacaggatatacattctcctcatctgcacaccgaaaatactccaagattgactacatatttgtccataaagcaagcctcaataaattcaaagaaatcaaaatcataccaaccacactcttggaccatggtgaagtaaaaatagaaatcaatactcggaagatctctcaaaaccataccattatatggaaattaaacaacttaatccgtttgggtaaacgatgaaattaaagcagaaatcaaaaacttctttgaaataaaaatagagacacaacataccaaaaggtctctgatacagaaaaagcagtgttaagaggaaggtttatagtgctaaacgcctatctcaaaaagttagaaaggcctcaacttaataatcttagcatcacctaatggaattagaaaaacaagaaaaaactaactctaaagctagcagaagaaaagaaataactaaaatcagaatgtaacataatgaaattgagacctcaaaatctgcacaaatatcagtgaaacaaaaagttctttgaaaggataaataagattgatagattactaactagaataaaaagcagaaaaaaaaggagaagatccaaataagcccaatcagaaatgacaaacgtggcattataaccaatctcacagaaatacaaaagattcatagagaatattatgaacacctctacacatataaactacaaaatctacaggaaatggataaatttctgaaaacacaccatctcccacgattgaatcaggaaggaaacactgaacagaccaatattgagctctgaaatagaatcagtaataaaaacctgccaactaagaaagccccagaccagatggattcacagaccagccaaatcttaccagaaatataaggaagagcctgtaccaattctactgaaactatttcagaaacttgaggagtagagtctcctctgtaactctttgtatcaggccagactcaccatgataccaaagcttgcaaagacacagtggaaaaagaaaactacaggccaatatccccgataggcatagacatgaaaatcctcaacaaaatactatcaaattaaattcaacagcacatcaaaaagctaattcaccatgatcaagtaggcttcattcctgggatgtgaggttggttcaacatatgcaaatcaataaatgtgattcaccatgtaaacagaattaaaaacaaaaaccatatgatcatctcaacagatgcccaaaaagctttagataaaatccaaaatctcttcatataaaaaccctcaagaaactaggctttaaaggaacataccgcaaaataagaaccacgtctatgccaaatccagagccaatatcatactgaatgggcaaaaaactgaaagcattttccttgagagatggaacaagacaaggatgtccattctcaccattcctattcaatatagtactggaaatgctagccagaggaatcagacaagagaaagaaaaagcattcaaataataaaagaaaaagtcaaaaataagtagcatttctataaaccaataatattaaagctatgagccaaatcaagaatgcaatcccatttacaatagacacacacaaaaaatacctaggaatacatctaaccaaagaggctaaagatctctacaatgagaattttaaagcactgctgtaagaaatcagagatgacagaaacaaaagcaaaaacattctatgctcatggattggaagaatcaatatcatcaaaatatccatacagcccaaagcaatctacagatccaatactattcctatcaaactgccaatgtcattttacacagcattggaatgtcattttacacagcactggaaaaaaacagcattgggaaagccagcgccatcacactatgtaacttcaaactatactataagcctacagtaaccaaaacagcatggtactggtacaaaaacaagacacttagaccaatggaacagaatagagaacccagaagtaaaaccacacacctacaaccatctatgcttcgacaaagttgacaaaaacaagcaataaagaaatgactccctatttaataaatattgctggattagcttgcaagctatatgcacaagaataaaatggcctgtactttttgcaatacacaaaaattaactcgagatagattaaagagttaaaggtaagacctcaagctgtaagaatagtagaagaaaaagcgcaacaaagccaaaaattgacaagtggtacctaagtaagctagagttcctgcacaggaaaataaaactatcaagagagtaaacagcctacagaatgggagaaaatatttgtaaactatgcatctgacaaaggtctaatatccaggaacttaaacaactgaacaagcaaaagctaagtaatttcattaaaaaatgggcaaaagacaggaacagacacctctcaaaagaagacatacaagtagccaacaaacacgtacaaaattatcatcatcaataatcatcagagaaatgcaaatcaaaacgacaataagacactacctcacaccagccaaaatggctattatgaaaaagtcaaaaagaaaaaacaacagatgctgatgaggctgtggagaaaagggaatacttgtacactgttggtgggaatgtaaattagttcagctactgtgaaaagcagattggagatttctaaagaacttaaaacagaggtatcatttgacccagcaatcccattactgagtatacatatttaaaagcccaaatcattctaccaaaaagacacatgcacttgtatgttaaatgcagcactatacccaatagcaatgacatggaatcagtttcaggtgcccatcaatggtggactggataacgaaaacatggtacatatatgccatggaatattatgcagccattaagaagaacaaaatcatttcctttgcagcaacgttgaagcagcagaaggccattattctaaatgaaataagacagaaacaaaaaaccaaatactgtgtgttctcaattagaagtggaagcaaaatatcaggtacttgtggacataaagatggtaaccagagacactggggtctgctggaagttgcggggagggaggaaagcaagggttgaaaaactgttgggtactatgctcagtaccggggtgatgggatcactcatgctctaaacctaagcatcacacaatatacccaggtaacaaacatgtatatgtacccctgagtctaaaataaaagttggaaaag

SEQ ID NO: 3247 - DNA, 2751 bp, Homo sapiens
  source 1..2751: mol_type = other DNA
cagattaaaaacaaaaacaagatccagttaaatgctaccaacaagaaactcacctcacatataaagacacactaaactgaaaatgaagggatagaaaatatattcaacgctaatagaaaccaaaaaagagcaggactgtatttatgttagataaaatagatttcaagacaaaaactgtaaaaagagacaaagaaaatatcatataatgataaataggtaaattaagctggaggattcaacaattgtaaatattcatgctctgaatgctagagtacccagatatgtaaagcaaacattattggaactaaagatagagaccccaatacaataatagctgtggacttcaacacaccattttcagcactggacatatcacccagataagaaatcaacaaatcaacatggaacctaatttatagatcaagtgaatctaatagacatttacagaatattttatccaacaaatgcagaatgcacattcttctcctaagcacatggaacattctcaatgatagaccatatataagtccactaaagatgtcttaatttaaaaaaaaacactgaaattatatcaagtatcttttctgactacagtggaataaaactagagagttgtaaccagagaaactttggaaactctacaaacacttgaaagttaaacattattctcctgaatgaccactgggtcattggagaagttaagaaggaagttttttcaattctagaaacaaatgaaaatggacacgcaacataccaaaaccaatatgacactgcaaaaacagtagtgagagggaagcttagaacaataaatgccttcatcaaaagtacaacttccaaaaaacaacctaatgattcatcttaaagaagtagaaatgcaagggcaaccaaactcaatcttagtagaagaaaataaataataaatatcagagcagaagtaaatgggattgaaacaaacaaagacaacacaaaagcaagtaaagaaggtttttgggggaaagataaacaaaagtgaaaaaatttcagccagactaaaaaaaaaaaaaaaaaaaatcagagagaagacccaaataaataaaatcagagttgaaaaaggagacattacaaccgatagctaagaaattcaaaagattgttttgagcaactatactatgagtaactatatgccaataaattggaaaacctggaagaaatggataaattcctagacatgtccaacctaccagtgttgaactatgaataactttatatctggaacagaccaataataaataatgggatcaaagctgtaataaaaagcctcctatcaaagaaaagccaaggacctaattgcttcactggagaatcctactcaaactatttcagaaaatttaggaggagggaataatttcaaactctttctacaaggctagtattatcctgatagcaaaaccaggcaaagaaaaaacagataagtacatgctactatttctgatgatcatagattccaaaatcttcaatgaaatattagcaaactgaattcaacaacacattaaaaagatcacttatcaagaacaagtgggattcatcccagggatgcaacgatggttcaacatatgcaaatcaatcattgtgatacattactttaacagaatgaaggagaaaatctatatgatcctttcaatagatacccaaaaagtacttggtaaaattcaacataccttcatgagaaaaactctcaaaaaactgggtatagaaggaaccaacctgataactaccttacaaaacagaaccacagctagtattatgctgagtgggaaaaactgaaagcctttttttctaagatccagaataagagaatgatgcccactttcactacttttatttcacttagtagtggaagtccttgccagaacaattagacaagagaaagaaataaaggcatccgaattggaaaggaattaaaaatatccttccttgcagatgttatagccttatatttagaaaaacctaagtactccaccaaaaaaacaattagaactgataaacaaatttagtaaagtttcaggacacgaagttaacatacaaattcagtggcatttctatgtcaacaataaactatctaaaaagaaaccaaaaaagtaatcccatttaccatagctatagataaaattaaatactttggaataaacttaaccaaataagtgaaatatctctataaaaaactataaaacattgatgaaagaaattgaagaggacacaaaaacatggaaagatactccatgtttatagaatggaagaataaatgtggttaaaatgtctatactacccaaagcaatctacagattcagtgcaatctgtatgaaaataccaatgaaattcttcagagaaatggaaaaaacaatcctaaaatttatgtagaactacagaagactcagaatagccaaagctatcctgatcagaaagaacaaagctggagtcataacattaccttacttcaaattatactataaggctacagcaacagcatggtactgtcataaaaatggatgcatagatgatggagcagaataaacaaaacccagggataaatccatacatataccacaaactgatttttgacaaagttgccaagaacatgaattggggaaaatacagtctcttcaatgaatgatgctggggaaactggatatctacatgcataaaaattaaactagactcatatctctcatcatgttcaaaaatcaaatccaaattgattaaagacttacatct

SEQ ID NO: 3248 - DNA, 1403 bp, Homo sapiens
  source 1..1403: mol_type = other DNA
aggtggcaaaacagaaagctccaccaatcatcatcccttacccacaaggataccaagttaacaactatctacacagagaaacaccttatacgaaccccaaatcatgtgagcactcacagtacctggttttaactttgtatccctgaaagaagaactgaagatatagaaaaaacagtccagagtcactgatgccacccctccctcatcccccagcagcagcatggtgcagagagcctctctgggtgctggaggagggagaacacatttgtgaggcattgaactcagtgctgttctgttggcacagaaagcagacccagaccaaactcagctgacaccgcttacagagggaacattaaaaccgggccttagccagaggggaatcactgatcacacaggtctgaacttgagttctggcaatccttgccacttaggtccaaagtgctcttggtctctaagtaaacttgaaaggcagtctctgccacaaggactgtaactcttaggcaagtcccagggctgaacttgacccagaagcagtggaccggggaaatacatgacatactgagacaccaagtatggcagccaagagagtgctggcattaacccttccctaaccccagacagcacagctcaaagctgcaaaagagacttcttccttctgcttgaggagaagagagggaagagtagggaggactttgtcctgcatcttggttactggctcagccacaacaaggtatctctacaacgctgcatgaatcacagcattcctgggcttggggtgccccctaaagcagaaactgcttagttcacaacacccaagttctttcaaatatctagaaagttttcccaagaagaacagctacaaataatatgaggcggtaaagactacgataaatacctaactcttcaatatccagacactgaagaacatctactagaattaacatcatccatgaaacatgacctcaccaaatctactaaataaggcaccaaggaccaatcctggagaaacagagatatgtgacctttcagacagagaattcaaaatagttgtgttgaggaaagttgaagacattcaagacaacacagagaagaaattcagaattctatccgataaattaaacgaagatattgaaataattaaaaagaatgaagcagcaattctgaaccagtgtatttgaaaatatactgtcagaggaaacaaacaaacaaaaaagacaaaaaaaagtacatctgtacgatctagaaaatagcctcaaaaggtaaaaatctaagagttattgaaggtctttaatagtatatatggaaagatacagggatagaaaatttattcagaggaataagagaacttctgaaacttagagaaaaatatcaatatccaattacaagaaagttatagttccaat

SEQ ID NO: 3249 - DNA, 1475 bp, Homo sapiens
  source 1..1475: mol_type = other DNA
ccaaaagaacaaagccggaggcatcacgctacctgacttcaaaccatcctacaaggctacagtaacaaaaacaccatggtactggtaccaaaacagagatatagaccaatgatatagaacagatatagaacagaacagagccctcagaaataatgctgcatatctacaactatatgaactatatgatctttgacaaacctgacaaaaacaagaaatggggaaaggattctctatttaataaatggtgctgggaaaactggctagccatatgtagaaagctgaaactggatcccttccttacaccttatacaaaaattaattcaagatggattaaagacttacatgttagacctaaaaccataaaaaccctagaagaaaacctaggcaataccattcaggacataggcacaggcaaggacttcatgtctaaaacaccaaaaacaatgacaacaaaagccaaaattgacaaatgggatctaattaagctaaagagcttctgcacagcaaaagaaactaccattagagtgaacaggcaacctacagaatgggacaaaatttttgcatctgacaaagggctaatatccagaatctacaatgaactcaaacaaatttacaagaaaaaaatcaaacaaccccatcaacaagtgggcgaaggatatgaacagacacttctcaaaagaagacatttatgcagccaaaaggcacatgaaaaaatgctcatcatcactggccgtcagagaaatgcaaatcaaaaccacaatgagatgccatctcacaccagttagaaaggctatcattaaaaactcaggaaacaacaggtgctggagaggatgtggacaaataggaacatttttacactgttggtgggactgtaaactagttcaaccattgtggaagtcagtgtggtgattcctcagggatctagaactagaaataccatttgacccaccaatcccattactgggtgtatacccaaaggattataaatcatgctgctgtaaagacacatgcacatgcatatttattgtggcactattcacaatagcaaagacttggaaccaacccaaatgtccaacaatgatagactggattagaaaatgtggcacatacacaccatggaatactatgttgccataaaaaatgatgagttcatgtcctttgtagggacatggatgaagctggaaaccatcattctcagtaaactatcgcaaggacaaaaaaccaaataccgcatgttctcgctcataggtgggaattgaacaatgagaacacatggacacaggaaggggaacatcacacaccggggcctgttgtgggatggggggaggggggagggatagcattaggagatatacctaatgttaaatgacgagttaatgggtgcagcacaccaacatggcacatgaatacatatgtaacaaatctgcacgttgtgcacttgtaccctaaaacttagagtataataacaaaaaaaa

SEQ ID NO: 3250 - DNA, 206 bp, Homo sapiens
  source 1..206: mol_type = other DNA
tgaaagctaaaagaagtagactctgatctcacctgcatagcttaccagccatatgactcttagcattacattatttctgagctttagagttatttctatcacaagaagataacaataactagtttgaaaagttggaccctcatatataaagtgtaaaaatggaatgagacaatatatgccaagtatcaagctctgcacctggtaca

SEQ ID NO: 3251 - DNA, 309 bp, Homo sapiens
  source 1..309: mol_type = other DNA
ggccgggcgcggtggctcatgcctgtaatcccagcactttgggaggccaaggcaggcggatcacgaggtcaggagatcgagaccatcctggctaacacggtgaaaccccatctctactaaaaatacaaaaaattagctgggcgtgcttgtggccgtctgtagtcccagctacttgggaggctgaggcaggagaatggcgtgaacccgggaggcggagtttgcagtgagccgagatagcaccactgcaatccagccagggcgacagagcaagactctgtctcaaaaaaaaaaaaaaaaaaaagaaagaaa

SEQ ID NO: 3252 - DNA, 4033 bp, Homo sapiens
  source 1..4033: mol_type = other DNA
agaaacccactccacctataaagacacaaaaagactgaaaataaaaagatggagaaagatatttcatgccaatggaaaccataaagagcagaggcagctatacttatatcagacaaaatagatttcaagacaaaaactataaaaggagacaaagaacatcattatataatgacaaatgagtcaattgagcaagagaatataacaattgtaaatatatatacacctaacactgcagcacccaaatatataaagcattattagagctaaagagaaacatagaccccaatgcaataataactggaaatttcaacacccattttcatattggacagatcttccagacagaaaatcaacaaagaaacattgaacttaatctgcactatagagcaaatggacctaataaagatttacagaacatttcatcaaatggttacagaatacattattttcctaagaacatgtgccattctcaaggacagaccacatattaagtcataaaacaagtcttaaaacattcaaaaaaatgaaataatgtcaagcatcttctgtgaccacagtggaataaaagtagaaattaataacaaaggggattttggaaacaatacaaacacatggaaattaagcaatatgctcctgaatgaccagtgggtaaatgaaggaccagtgggtaaatgaagaaattaagaaagaaattgaaaaatttcttgcaacaaatgataatggaaagacaagataccaaaacctaagggatacagcaaaagcaataataagagggacatatatacctacaaacacctacatcaaaaaaagaaaaacttcaagtaaacaacctaatgatgcatattaaaagactataaaaacaagagcagaacaaatccaaaaattagcagaagaaaaaaaaataaagatcagatcagaaataagtaaaactgaaatgaaggaaacgatacaaatcatcaacaaaacaaaaagtctattctttgaaaaaataaataaaattgacaaacctttagccagactaagagaaaaagagaaaagacccaaataaataaaatcagaggtgaaaaaggagccattacaattcataccacagaaattcaaaggattattagtggctactatgagcaaccatatgccaataagttggaaaatctagaagaaatgaatgagtttctagacacataaaacttaccaagattgaagcatgaagaaatccaaaacctgaacagaccaataaaaagtaatgagatcaaagctgtaatagtctccccgcaaaaaaaaaaaaaaaaaaaaaaaaaaaaaaaccaggaccccatgtcttcactgctgaattctaccaaacatttaaagaacaactcataccaattgtactcaaactattccaaataatagaggaggagggaatacttccaaactcattctgcaaggccagtattaccctgataccaaaaccaaagccacatcaaaaacaaaaaactataggtcaatatgactgatgaatattgatgcaaaaaatcctcaacaaaatactagcaaaccaaatccaacaacacattaaaaaaaattattcatcataaccaagtgagatttatcccagggaggcaaggatggttcaacatacacaaatcaatcaaattgattcatcatagcaacagaatgaagggcaaaaccatgtgattatttcaattgatgctgaaaacacatttaatacaattcaatatttgttcatgatgaaaaccctcaaaaaactgtgtatagaagacggtaccttaacataataaaagccatatataacagacctatagctagtatcaccttgaatagggaaaaactgaaagcctttcctataagatctggaacatgacaaggatgcccactttcaccactgttattctgcatggtactgaaagttctagcttgagcaatcaggcaagtgaaagaaataaagggcacccaaattggaaatgacaaagtcaaattatccttgtttgcagatgatatgatcttatattgaaaaaaattctaaagactccaccaaaaaactattcatactgaaaaacaaattagtagcatttccatatgccaagagtgaacaaactgaaaaagaaatcaagaatgcaatcccacttacaatagttacaaataaaattaaatattaggaattaaccaaataattgaaagacctctacaataaaaactataaaatattaatgcaagaaattaaaggggacaccaaaaaatgaatagtcagtccacgttcatgaattggaaaaatcaatattgctaaaacagtcatactacacaaagcaatctacagattcaatagaatccctatcaaattaccaatgatattcttcacagaaatagaaaaaaaaatcttaaaactcatgtggaactacaaagaaaccagaatagccaaagctatcctaaccaaaaagaacaaaactagaagaatcacattatcagacttccaattatactacaaagctatagtaactaaaatggcatgacactggtataaaaacagacacatagaccaaatggaacagaatagagaaccgagaaacaaatccatacatctgcagtgaactcatttttgacaaagttgccaagaatgtacatgggaggaaaggacagtctcttcaacaaatggttctgggaaaactggatgttcataagcagaagaatgaaactggaccactatctctcaccatatgcaaaaatcaaattacaatgtattaaggacttatatcttaagacctcaaactatgcaactactttgacaaaacattggagaaactctccaggacattggagtaggcaacatttccttgagtaatgcctcgcaagcacaggtaacaaagcaaaaatgaacaaatgggatcacatcaagttaaaaagcttgtacaaagcaaacaaaaatcaaaaaagtgaagagaccacccacagaatgggagaaaatatttgcaacctatccacctgaaaagggattaataaccagaatatataaggaactcaaacaattctacaggaaaaaaatctaataatttgatttaaaatgggcacaagatgtgaacagacatttctcaaaaaagacatacaaatgacaaacagtcatatgaaaggtgctcaatatcattgatcatcagagaaatgcaaatcaaaactacaacgagatattatctccccccagttaaaatggcttatatgcaaaagacaggcaataataaatgttgacaaggatatgaagaaaagagaaccctcatacattgttggtgggaatgtaaattagtacaaccactatggaaaatagttcggaggctcttcaaaagtctaaaaatagacctatcatacaatgcagcaagcccactgatagatacatactgaaaagaaaggaaactagtatattgaagagatatctgcacttcacgtttgttgcagcactgtacacaatagccaagatttggaaacaaccttagtgtccatcaacagataaatgcataaagaaaatatggtacatgttcacaatggagtgccattcttctataaaaagaatgaggtcctgtcatttgcaacaacatggatggaactggaggtcattaagtgaaataaaccaggctcagaaagactaacatcacatgttgtcacttatttgtgggaactaaacattaaaacaattgatctcatggagacagagagtagaagaatagttaccagaggctgtgaagggtagtggggctggggggttcagggcacagggatacagggatggttaatggatacaaacaatagaaagaatgaataagacctaatatttgctagcaaaacagaatgactatagtcaaaaataatttaatagtgcattttaaaataactaaagagtataattggattgcttgtaacacaaaggataaatgcttgagacgttggataccccatttaccatgatgtgattattacacattgcatgcctgtatcaaagtatctcttggaccgcataaatatatacacccactatatacccacaaaaatt

SEQ ID NO: 3253 - DNA, 153 bp, Homo sapiens
  source 1..153: mol_type = other DNA
aggcagtgtggtctagaattctaagtacaggactgggaaccaggtagttctgatttctgtttctggccttgattccatctgcaaattttggcaagtcatttgacgtctcggtatcagaatcatcatctgtaaaaagggatttggaagaatact

SEQ ID NO: 3254 - DNA, 101 bp, Homo sapiens
  source 1..101: mol_type = other DNA
atgcctgtaatcccagtactttgggaggctgaggcgggaggactgcttaaacccaggaggttgaggctgcaatgaactgtgattgtaccagacctgtactc

SEQ ID NO: 3255 - DNA, 97 bp, Homo sapiens
  source 1..97: mol_type = other DNA
tttccatcatactatttatcacagtctaattaccagtttatcagtctcccattaaagtgggggctccctgagagcaaggactgtcatcttcactttg

SEQ ID NO: 3256 - DNA, 259 bp, Homo sapiens
  source 1..259: mol_type = other DNA
tctgagaaggtttgcctgatattctatattagatcacatccttctgttgtgtgttttttcagtactttgcatttttcctttgtagcatttaatatgactccaattaaatactgaattatataattaatggtttcatatcagtttctttaagtagaatgttagcttcaagagggcaggaattgggatttatacagcaatatccacaatgcctagccacatttctggtacatagtaggtactcaataaatattttttgaac

SEQ ID NO: 3257 - DNA, 248 bp, Homo sapiens
  source 1..248: mol_type = other DNA
ccgcttcttcagctaattaaattctcattcctaaaaactcagttctggcatgttatcctcttaccccactgtcccagtctaatttagatacacctcctttgtgatctcatagcttgctacgcttttatatcttatggctgtataataataattgatttacttatctaacttatcttcttcttgagagaagtagttccttgagggcaaggctcatgttttaatcatttttgtacccctcatttctagca

SEQ ID NO: 3258 - DNA, 79 bp, Homo sapiens
  source 1..79: mol_type = other DNA
caaaattgagctgggcatggtgatgcgtgcctatagttccagctactaaggagactgaggcaggaggactcctttagtc

SEQ ID NO: 3259 - DNA, 1141 bp, Homo sapiens
  source 1..1141: mol_type = other DNA
ctcagcacatatcaagacagtggcacaaaagcatcgtagtgttgtcattcaccactatgcaggagggaaagccaatttcatttcagaatgtcctcaattaatctgtagaaattattaattttattaaatcccaacccttgagaccaagtctttgtaatattctgttttataatatatgaagtatgcataaagcacttctgtgtattgaacaaagaaccacaagtaatctcatcacactttcagtagcaattgagttgcataccaaaccactggcaccttttcttgtgaaataccatttttatttgaaagaataattggcaaacaaactatggttattcagacttgcattttttttaatttaattaaaaacaaaatgaatgtgtaatcttgagaaaaaaatgacagcattattgacagtaataaattttaagctttcaaatagaaattaggattttggaaaacttatatccaccactgtgagtttcatatcttcccaatacttaagcacttttctgatgagatcggtgttattattaacaaacatgatttttaaatattgtatgcgatatgcattactcagcgaaccaatattttctaaatgacaaatgcataaaattataaaattataaatgggtaaaagattcatccaagtacaagacatgccaattaattttaatataataaacttcaaaaagttcactgacaatagtttcagattctatattgcaaataacctttaagaaactaccacttgtcaatctttggtgcagtatcaaagaaaaatatccacaggtatctgcaaaggctgttaaaatactcctcacttttccaactatatgtctgtgtgaagccggattttctagatatacttcaatcaaaacaacatttcacacgagattgaatgctgaagcaaatatgagaatccagctgtcttctattaagccagacattaaagagatttgtacatgtgtaaaatgatgacgctcttctcactcaatgtttatgttgtaaaagcattatttttcatttaaaaatgttaatattttatggctttatgattatttttaattattaaatattacagttttctgttttaatttctaatatggtaaataacaaaagcttttgagatcctcaataa

SEQ ID NO: 3260 - DNA, 287 bp, Homo sapiens
  source 1..287: mol_type = other DNA
gccgggcatggtggctcacgcctgtaatcccagcactctgggaggtcgaggtgggtgggtcacctgaggttgggagttcgagaccagcccgaccaacatggtgaaaccccgtctctactaaaaatacagaaaattagctgggcatggtggtgtgtgcctgtaattccagctactcgggaggctgaggcaggaagaatcacttgaacccaggaggcggaggttgcagtgtgccaagatcataccactgcactccagccctggtgacagaggagaccccgtctcaaaaa

SEQ ID NO: 3261 - DNA, 280 bp, Homo sapiens
  source 1..280: mol_type = other DNA
taaccttgatttttctcttttcttctatcccatatacattcatttatctctaaaatatgttccacattcagtcacttctctgcctgctggtacaaccctaatcctggaaatgttcagtttttgcatgggttattgcagcacctcttaactgatgttgttgcttttgtgctttgttcctacacagtctgtctctcatgtagcagctatcgtgatctttctcggttataggtcttttctgcttaagaccttttaatagtttataattgcaattaaagtaaaa

SEQ ID NO: 3262 - DNA, 304 bp, Homo sapiens
  source 1..304: mol_type = other DNA
gccgggcgtggtggttcacgcctgcaatcccagcactttgggaagccgaggagggtggatcacgaggtcatgagatcaagaccatcctggctaacacggtgaaaccccgtttctactaaaaatacaaaaaattagcgaggcatggtggcgggcacctatagtcccagctactcaggaggctgaggcaggagaatggcatgaacctgggaggcagagctggcagtgagccgagatcgcgccactgcactccagcctgggtgaaggagcgagactctgtctcaaaaaaaaaaaaaaaaaaaaaaaa

SEQ ID NO: 3263 - DNA, 295 bp, Homo sapiens
  source 1..295: mol_type = other DNA
gctgggcacggtggctcatgcctgtaatcccagcactttgggaggccaaggcagctggatgccccaaggtcaggcatttgagaccagcctggccaacatggcgaaaccccatctctactaaaaatacaaaaattagccaggcatggtggcaggcgcctgtaatcccagctactcgagagactgaggcaggagaatcacttgaaaccaggaggcgggggctgcagtgagccaagatcacgccactgcattccagcctgggtgacagagcgagactccgtctaaaaaaaaaaaaaaa

SEQ ID NO: 3264 - DNA, 239 bp, Homo sapiens
  source 1..239: mol_type = other DNA
aagctatgtggtttagagaaaagggcccccaaccacaaaagttagtggttcttattctgtctgcttcgtactaggtatatggtaactgagaaagtcacttaacctctctgaaccttaacttcgtcatctataaagtgaatctaacattttccccccggcctacctcacagggttgttgtgaggatcaaatgaaataatgtacatgaaaagacatatataaaatgtataatacagacaaa

SEQ ID NO: 3265 - DNA, 207 bp, Homo sapiens
  source 1..207: mol_type = other DNA
gattataacatattagtgatttgtgaaacttttttactaaaatgtgaccctcatttttctttacatgaaagaacatagaatatttcacaatgcatcccacgtggtaagaataaaaaattgttttagttatatgtacaaatgtgtgtgtgtgaacgtgtgtgtacttggtcattaaataaaatgtacttttttttttcctgtgagttg

SEQ ID NO: 3266 - DNA, 310 bp, Homo sapiens
  source 1..310: mol_type = other DNA
gctgggcacggtggctcacgcctgtaatcccagcactttgggaggccgagatgggcggatcacgaggtcaggaaatcgagaccatcctgactaacacggtgaaaccccgtctctactaaaaatacaaaaaaaattggccgggcgtggtggcgggcgcctgtagtcccagctactcaggaggctgaggcaggagaatggcgtgaacccgggaggcagagcttgcagtgagccgagatcgcgccactgcactccagcctgggcgacagaacaagactctgcctcaaaaaaaaaaaaaaaaaaagacagaaaa

SEQ ID NO: 3267 - DNA, 170 bp, Homo sapiens
  source 1..170: mol_type = other DNA
cagaggctcacccatggcaggcagtgaaaagagccaggagtcctgggttctagtccctgctctgcccccaactggctgtataacctttgaaaaatcattttctttgtctgagtctctggttctccgtcagcaacaggctggcataaggtcccctgcaggttccttctagc

SEQ ID NO: 3268 - DNA, 138 bp, Homo sapiens
  source 1..138: mol_type = other DNA
gccatctcccaaaacctgaatgctcttctcctagaggaaggattaggccaaggctagtcccagaaggcagagcaggaaaatatacagatgcggcattcagttcaatgttagaaaccattttctaatagtcaggtccaa

SEQ ID NO: 3269 - DNA, 1578 bp, Homo sapiens
  source 1..1578: mol_type = other DNA
tttgtttatagtcccgaaagacacaagcctgaaatctataatcccaaatatggaaattccaaaaagtcaaaacctctaaagtctaaatccctaacatctaaaatccccaaaatcaaaatcacaagatagttgcatcatattaggtggaactctttactttgtcactgtctttatgcagaggaaaatggatttcaattgaatcctcaaaccataaagacagatttggaattaggtgtgattgaggtttctaaaggtgaacttcaaggtattaccaataaagtttgtttttttccattctgtccaatgtgtttggcagaaacttcagatgagtggactggtcacgtgatacagcaatgacaaaaacttcagtattggcattcattccagctgatggcattccaggagcttttaatgaattaaagccacatttgcctgaagaagccagcgaagttactaactggttcaaaaacgattatgtgcatgatgggcagtattgttgcagttcaatcaccagtattgcttccaccagatttgtggtctatatatgtgtgcatatggaatagatttccacagacccacaacacggaagcatggcacagaagatgggaaaaaatggggaatactcatgtagttgtatactaaaccatagaagaattttgaaaagagcagtgtcacatggaaaataaatgtgaacatattctccaaggacagccatgtcgtaaaagaaaaaaagcagctattttttgtgatgtgagacttaaaaatatagttaatgactgtgaaagttggccagctcttatggactatctccatgcaattgcccataatctagctccataacttttttatttgttgaattttctttttagtttttagtttttatttttagtttttttcactatttgaaattgtcagcattatttttttataattcgccatgctacctatttcatctttgcatcatttccaatactgcatgcatcgtataaagagttttagagagtcctaatttgctttgtgcatttttgcaaatgtaactccatgaaagtgcattttcaaaatgttgaacttgtgtgtaagcagtatgtgtgtgcataaagacattaaaacttcctcgacaaatgaaaatgtatcttctttgtacatctgcttttatgaaagataaaatttctcaatgccttggctctttgggcaactgatgtggtggtgatatggtagtgactcatcacggtttttgatcaatcttatcaaaagacttagaagagtctaagaatcacagcatttcagatgactgctgtataaagctgggggcacacaattaccaaccacagtgtgatatacatttttatattttgctttttgatttatttatttatgaatatggttcatctgctcataactgttatacccatgtgactgttgttagtatatctgagtgtttctgcttgcaaaaatatggtattattgtccattttattgtgtaaagtagcctatgaagagttctgtcatgtttttgcatgtttcttaaataaatcccctttaaaaatgtaagtaaatattttacaacgttttgaaaac

SEQ ID NO: 3270 - DNA, 124 bp, Homo sapiens
  source 1..124: mol_type = other DNA
ctagctgtttgtcttgagcaagccacttgaacccctaagtctcagtttcatcgccagtgaaataaggataaagatattggccctatcgtccttgcggaatcattctaaggcttgaaagataata

SEQ ID NO: 3271 - DNA, 65 bp, Homo sapiens
  source 1..65: mol_type = other DNA
gagcctcggattgtattcgaactcctgggttctagacccagctctgctactaacttgtctgacct

SEQ ID NO: 3272 - DNA, 84 bp, Homo sapiens
  source 1..84: mol_type = other DNA
tctctgagcctcaaagttcccacctatgaaaaacagaagggtgttgcttatgtatctctagggtcttaaccagcttcagaaatt

SEQ ID NO: 3273 - DNA, 173 bp, Homo sapiens
  source 1..173: mol_type = other DNA
gtggcatggcaccatgaaaagaaaactaaatttagtaacttaacattcgcattatactcctggttctgccaaaataatttggtgacagaacttgagcaagtccctgcccaccttttaggcttcagatttccccccattattaaaaaagaggcttaaactatacagcccttcca

SEQ ID NO: 3274 - DNA, 173 bp, Homo sapiens
  source 1..173: mol_type = other DNA
gccaggtgtggtgactcacacttgtaatcccagcaatttgggaggctgagacaggaggattgcctgaggccaggagtttgacaccagcctgggcaacatagtgagaccttgtctctacaaaaaataaaataaaataaaaaccaaattagccagacatggtggcatgcgcttgt

SEQ ID NO: 3275 - DNA, 290 bp, Homo sapiens
  source 1..290: mol_type = other DNA
gtggctcatgtctgtaatcccggcactttgggaggccgaggcgggcggatcacgaggtcaggagattgaaaccaccctggctaacatgatgaaaccccatctctactaaaaatacaaaaaattagccgggcatggtggcagacctgtagtcccagctacttgggaggctgaggcaggagaatggtgtgaatccgggaggcggagctggcagtgagccgagattgtgccactgcactctagcctgggcaacagagtgagactccatctcaaaaaaaaaaaaaaaaaaaaaa

SEQ ID NO: 3276 - DNA, 525 bp, Homo sapiens
  source 1..525: mol_type = other DNA
actacaaacctattagaatggccaaaatccagaacactaacaatactaaatgctggtgagtatgtgaagcaacaaggactctaaatcattggtagtagaaatgcaaactagtatagctgtttggaaagacagtttagaggtttcttacaaaacaaaacttattcttactacataatcctttacccagtgaaaatgaaaacttatttccactcaaaaatctgcacacggatgtttatagcagctttatttacagttgcccaaacttggaagcaactaagatatccttcggtaggtgaatgaataaatcaactgtggtacatacagacaatggagtattattcagcactaaaaagaaatgaactatcaaactatgaaaagacatagttgaaccttaaatgcatattactaagtgaagaaaagcccatctgaaaagcctatatatgattccaactatataacattctagaaaagccaaacaaacctgcatgttgtgcacatgtaccctagaacttaaagtataataat

SEQ ID NO: 3277 - DNA, 161 bp, Homo sapiens
  source 1..161: mol_type = other DNA
caatagaatttcatcagttacaacaaatataccactttgtgaggaacgctgatagtagcagaggctatgtatgtgtttgggaaggaagtacatgggaaatctctgtaccttcctctcatttttgttgtgaacctaagacagccctaaaaaagaataaagtc

SEQ ID NO: 3278 - DNA, 305 bp, Homo sapiens
  source 1..305: mol_type = other DNA
ggccgggcgcagtggctcacgcctgtaatcccagcactttgggaggccgaggtgggcagatcacgaggtcaggagattgagaccatcctggctaacatggtgaaacgccgtttctactaaaaataccaaaaaattagctgggcgtggtagcaggctcctgcagtcccagctacttgggaggctgaggcaggagaatggtgtgaacctgggaggtggagattgcagtgagccaagattgtgccactgcactccagcctgggcaacagagcaagtctctgtctcaaaaaaaaaaaaaaaaaaaaaaa

SEQ ID NO: 3279 - DNA, 134 bp, Homo sapiens
  source 1..134: mol_type = other DNA
gcaaggagcggtggctcatgcctgtaatcccagcactacgggaggcggaggcaagaggatcacttgaactcaggagtttaagaccagcctgggcaacataatgaaaccacctccctattttaaaaaaaaaaaaa

SEQ ID NO: 3280 - DNA, 152 bp, Homo sapiens
  source 1..152: mol_type = other DNA
gccagttgtctaacaagctggcacttaatcttttcaaactttagtgtcctccataacaacaacaaaaaaagtatcttcctcacaacttcagaggattgttttgaggatctaatggtagactgaatggatgtgaaagtcctcgatataaaatg

SEQ ID NO: 3281 - DNA, 361 bp, Homo sapiens
  source 1..361: mol_type = other DNA
tgatgtggtttggatctgtgtcctcaccgagtctcatgttgaaatgtaagccccctggtgggaggcgatgggattatggggcagagtcctcacgaacggtttagcaccacccgctcagtgctgttctcctgatattgagtcctcatcacatctggttgcttcaaagtgtgtggtgcctcccctctgtctccctcctgctctggccatataagatgtgcctgcttctccttcgccttctaacatgattgtaagtttcctgaggcctccctagaagcaaaagctgctgtgcttcctgtaccatctacaggaccgtgagccaattaaacctcttttctttataaattactgtctctggtatttc

SEQ ID NO: 3282 - DNA, 243 bp, Homo sapiens
  source 1..243: mol_type = other DNA
attccacttatttaaaatgtccagaataagcaaatctccatatagaggaagtagattagtggttgcttcgggatgggaggaatgggaagattgaggtctttcttttgcagtgataaaaatgtcctaaaattgactgtagcgatggtcacacaactctgaatatgcttaagaccattgaattacacactttacgttggtgaattgtatggtatgtaaattatagttcaataacatagttacaaa

SEQ ID NO: 3283 - DNA, 201 bp, Homo sapiens
  source 1..201: mol_type = other DNA
ccaacatggagaaaccccgtctctactaaaaatacaaaaaaattagccaggcgtggtggcgcgcacctgtaatcccagctactcgggaggctgaggcaggagaatcacttgaaccagggaggcagagtttgcagtgaatggagattgcgccgctgcactccagcctgggcgacagagtgagactgcatcacaagaaaaaaa

SEQ ID NO: 3284 - DNA, 1796 bp, Homo sapiens
  source 1..1796: mol_type = other DNA
ggaggcagagcaatatggccaaatagaagcctccaccgattgtcctccctgcaggaacaccaaatctgacaaccacctacacaaaaagcaccttcataagaaccaaaaatcatgtgagcaatcacagtaccttcatattgctgaaagaggcagtgaagaggatagaaaagacagtcttgaattgctgaccccagccctcccccatgcgctcgtagcaaccacagggcacagaggaagaatctgcgctgcacacggggaaagagcacagcaactgtgggactacaagccggaacgcagtgctgccaatcccggcagaactcagccaatgccaatgaatggagcatttagaccagccccagggacaggacaatcacacagcctggaggttggaactggagtttctgcaagcctcgccaccacaggctaaagtgctctggggtcctaaataacagtaaaaggcaggctaggtcacaaggactgtaactcctaggcaagttgtagtgctgggctgggctcagagccagtggacttggaggtacatgacctagtgagacaccagccaatgcggctaagggagcgcttgtgtcacacatctcccaatcaaaggcaggaaggctcccagctccaaaagagattccgtccttctccttgagaagaggagaggaaaggataaacaggactttgttttgcaacataaataccatctcagccacagttgaataaggcatcaggcagagtcgtgaggtccccattctaggctctaactcccgggtgatatttttagacacaccctgggccagaaggaacctgaagggaaggatcaagtccaggaagaattcaccacttgctgactaaagagcccttagaccctgaataatcaccagcagcaaccaagtaacacacactgtgggcctcagctaagactcagacatgcagacttcaggtgtgacccggcatattcacagctgcggtggctacgaggaaagactccttctgcttgagaaaaggggagggaaaaataaaggggattttgtcttgcagattaggtaccacctcaaacatagttgggaggagcaccaagtgggttcgtagggtccctgattccagagaacactggacggcacctctggaactaccctaagccagaagggaactcactgccctgaagggtgggtcccaggaatggcgacattcatgaaaagctgagcccttgggccttaagtgaacagtgacaacattgtggcagtactccctgtgggcctgtgtggaggtggacacagggggtgactccactgcctggggagaggaaagggatgggtgggaaggactgtgtcttttgatttcagtaccagcttaaacatagttgaatacagtgccagggaaatttctaaggtttccgattgcaggccctgacttccaggcactctgaacctgtccggagcctggagcccagaggaattcaccaccccgaagggaaatacacaagaatgactagcttcagccactcttgaaataatgactatagcctgagtgccttaagagaacacagcttgcagccaggtaatagttacagcaggacatgggcaagacacggtgctttgctggcttcagatctgacgaagtacagtcccaacgatggcggcgacaggagtgcttgtatcacccctctccaagctgcaggcagcttagccagagagagagagagactgcactcattttggagaaagtaagggaagaaaacaagagtctctacctggtaatccagagaattcttccagatgttatccaagaccaca

SEQ ID NO: 3285 - DNA, 121 bp, Homo sapiens
  source 1..121: mol_type = other DNA
cccccacagcatttgttccttcaggacactaaccctctggatctgtgtcttctgtgtctccagtggccaacagtgttgcaaacaggaacccgaggtgttcacttcactgttgaaggaacga

SEQ ID NO: 3286 - DNA, 850 bp, Homo sapiens
  source 1..850: mol_type = other DNA
ccacatttctaaaatcgaagttctgatcttttcctctggacctgccccacctgcatcttccccatctcagttaacgtcagttgcatccttcaggtgctcaggccgaaatcctcggcaccgtctttattcccctctcacattttgcaccaggaaattctgctggctctaaggccatcaaactgtgcccagaatgtggcccctcctcagcatctccagtgctaccaccgagatggtccacgatgccatcatctctcacctgcactactacaggtctccctgtttccagctcagcccccaccccagtctagtcccagtgtgtcagccagggctgtctttttacaacataaggcagaccacaccacttctttgctccaatcctcccatttcactcagaagaaaagctccgacaacagctgcaaagccgtgcacgacctgcgcccctcccctgcctccttaatttgctgactgcaccgcagccacacggacgtctttcttgtcccttgaatgcgctgggcctgctcttgccttgggacctttctgtgcattgcttagtctgctcagaagccttctcctctacatatccacttgtctaaaccctctacctccaccttcatgccccttctcagcgaggtctaccatgaccatgctgcctacaaattcagtctccccttctgtactttgacgtactttatagtgctgatcacaattgaacgtcatacatattttgttttctttattatctgagtcctccaactagaatgaaagattttgcccattatggtttccctagtgccaagaacagtacctggcacataccaggggctcagtaaacatttgttagatgaatgaa

SEQ ID NO: 3287 - DNA, 967 bp, Homo sapiens
  source 1..967: mol_type = other DNA
tgtggggaaaagcaagagagatcagattgttactgtgtctgtgtagaaagaagtagacataggagactccattttgttatgtactaagaaaaattcttctgccttgagattctgttaatctatgaccttacccccaaccccgtgctctctgaaacatgtgctgtgtcaactcagagttgaatggattaagggcggtgcaagatgtgctttgttaaacagatgcttgaaggcagcatgctccttaagagtcatcaccactccctaatctcaagtacccagggacacaaaaactgcggaaggccgcagggacctctgcctaggaaagccaggtattgtccaaggtttctccccatgtgatagtctgaaatatggcctcgtgggaagggaaagacctgaccgtcccccagcccgacacccgtaaagggtctgtgctgaggaggattagtaaaagaggaaggaatgcctcttgcagttgagacaagaggaaggcatctgtctcctgcctgtccctgggcaatggaatgtctcggtataaaacccgattgtatgctccatctactgagatagggaaaaaccgccttagggctggaggtgggacctgcgggcagcaatactgctttgtaaagcactgagatgtttatgtgtatgcatatccaaaagcacagcacttaatcctttacattgtctatgatgccaagacctttgttcacgtgtttgtctgctgaccctctccccacaattgtcttgtgaccctgacacatccccctctttgagaaacacccacggatgatcaataaatactaagggaactcagaggctggcgggatcctccatatgctgaacgctggttccccgggtccccttatttctttctctacactttgtctctgtgtctttttcttttccaaatctctcgtcccaccttacgagaaacacccacaggtgtgtaggggcaacccacccctac

SEQ ID NO: 3288 - DNA, 299 bp, Homo sapiens
  source 1..299: mol_type = other DNA
gccgggtgcggtggctcacgcctgtaatcccagcactttgggaggctgaggcgggtggatcacctaaggtcaggagttcgagaccagcctagccaacatggtgaaacctcgcctctactaaaaatacaaaaattagccaggcgtggtggcgggtgcctgtaatcccggctactcaggaggctgaggcaggagattcgcttgaacctgggaggctgaggttgcagtgagccgagatcgcgccattgtactccagcctgggcgatgagcaaaactccatctcaaaaaaaaaaaaaaaaaaa

SEQ ID NO: 3289 - DNA, 301 bp, Homo sapiens
  source 1..301: mol_type = other DNA
gccaggcacagtggctcacacctgtaatcccagcactttgggaggccgaggtgggcggatcaccagaggtcaagagtttgagaccagcttggtgaaaccctgtctctactaaaaatacaaaagttagctggggctggtggtgggcatctgtagtcccagctaattggaagggtgaggcgggaggatcgcttgaacctgggaggcggaggttccagagagccaagatcgcaccactgcactacagcctgggcgacagaacgagaccctgtctccaaaggaaaaacaaaaaagaagaataaaa

SEQ ID NO: 3290 - DNA, 293 bp, Homo sapiens
  source 1..293: mol_type = other DNA
ggccaggcacggtagctcatgcctgtaatcccagcactttgtgaggcagaggcgggtggatcacctgaggtcaggagttccgagaccagcctgaccaacatggcaaaaccctgtctctactaaaaatacaaaaattagctgggagtggtggcgcacacctgtagtcccagctattggggaagctgaggcaggagaatcacttgaacctgggaggcaggggttgcagtgagccgagatcacatcactgcactccagcctgggcaacagagcaagactccgtctcaaaaaaaaaa

SEQ ID NO: 3291 - DNA, 121 bp, Homo sapiens
  source 1..121: mol_type = other DNA
ggccaggcatggtggctcacacgtgtaatcccaacactttgggaggctgaggaggaaggatagcttgaggccaggagtttgagactagactgggcaacatagcaagaccccgtctctacaa

SEQ ID NO: 3292 - DNA, 112 bp, Homo sapiens
  source 1..112: mol_type = other DNA
cgcagtggctcttgcctataatcccagcactttgggaggctgaggcgggaggatcacttgcgcccaagagttcgagaccaccccatctctacaaaaaaatccaaaaagtaat

SEQ ID NO: 3293 - DNA, 895 bp, Homo sapiens
  source 1..895: mol_type = other DNA
gaatagaaggaaactatgtcaacctaagaaaaaccatatacaaaacacacacagtgaacatcatactcagtggtgaaagactgaaagcttttcctctaagataaggaagaaggcaagtatgtctgctttcaccacttgtactcaacatgaccactagctgaatagttgaagttgttgtcaaagcaattaggcaagaaaaagaaataaaagacatccaaattagaaaggaagaagcaaaattacttgttcacaaatgatatgatcttatatgtaaaacaccctaaagattctacacaaaaactgttagaattattaaaccaattaagcaaagtagcaggatacaaagtcaatacacaaaaatcagttgtatttcttctaacactgaacaatctaaaatggaaattaagaaaacaattctgtttattatagcatcgaaaagaacaaattttcagaacactgagcctcctaaatgaagaattaacttcatcaagaaagtaaaaaacttgggcaatgaaaactataaaacatgtatgaaagaaattaagaagacataaataaatgggaagggatctgtggtcatagattggaagacttactattgcaaaaatgtcaatattacccaaagcaatctatagacttaatgcaattcctatcaaaatcccagtagggttttcaaagaaatagaataacccatcctaaaagtcacatagaatttcacggtaccctgaaagccaaaatggtaatgaaaaagaaaaacaaaggtggcgggctaacacttcctgattccaaaacttactacaaagttacagtaacagaaacagtctggtactggcatgcagacagacatacagaagggaataaaacagaatccagaaataaatgccatatacaatta

SEQ ID NO: 3294 - DNA, 445 bp, Homo sapiens
  source 1..445: mol_type = other DNA
caacctacaatggatcatgatctaaatgtaaaacctaaaacttaaaactgttagaagaaaacacaggctaaaagcgagacactggaattgtcaatgatttcttggatatgacacaaaggtacagacatgtcttgtctgtaatctctgacaagacatgagacccagaatacacagaggaactcctaaaactcgacgataaaaccaaacaccctaattaaaaaatggtcaaggaactcatacagacattttcccaaagaagacacacacatggacaataagcacatgaacagatgtgtcacaaatgcaagtcaaaactacaatgagatgtcacctcacacccactagcctggctactatgaagaaaacagaaaataaaaagtgttggtgaggatgtggagaaattggaatccttgtgcactttggtggaaatataaaattctacaac

SEQ ID NO: 3295 - DNA, 203 bp, Homo sapiens
  source 1..203: mol_type = other DNA
aatggttttcaacatggaacaactttgcgcccccagggacacctggcaatgtctgctgcccaatcgaggaaaagagtctacgggcatctagtgggtagaagccagggatgctactaaacattttataacaacacactggacagctttccacaacaaagaatgatctagcccaaaaatcaaggatgcctaaattgagaaattct

SEQ ID NO: 3296 - DNA, 761 bp, Homo sapiens
  source 1..761: mol_type = other DNA
cagtaatatgtggtatgatgatgttttggccagccacagaccatgttaagtagggatcccttaaggttataatcaagctgagaaatttatatctcctagtgacatctttgctgtcataacattgtagcatgacgtatatcaagtgtttgtggtgatgctggtgtaaataaacctgttctgccagtcataaaagcatagcacgtataattaggtacagtacataatacttgataaatattaacaattatgttactagtttatctactgtacttttagtagttattttatagagtgcacttctacttattttagaaaaaagtaaagtgtaaaacggcctcaggcaggcccttcaggaggtattccagaagaagacattgttttcgtaggtggcgatagctccatgcatgctattgcctctgaagacctttcagtggtactgtccagtgatactgatgattctggccttgggtaggcttaagttaacgggtgtgtgtgtgtttgtttttaacagtatttaaaagtgtgtgtttgtatttaaacagtaaaaaaaaaaattaaaaaatagaaaaaagcttatagaatcagaatataaagaaagaaaaaattttgtacctctatacagtgtatttgtgttttaagctaaatgttaaggtgaaagagtcaaaaagttaaaaaatttaatttataaagtaaaaaggttacagtaagccaaggttaatttattactgaagaaagaaaaacatttttctataaatttagta

SEQ ID NO: 3297 - DNA, 723 bp, Homo sapiens
  source 1..723: mol_type = other DNA
tgaaaccgcctttgcaaaaattatcacagtgagaaaataatggcagtgaaagaaagctgatctagccaacctccctcttgcctttagctttcaagctgcttttacttattcctgggtttaagccaagctacatgtgggagtcatttagttgatagtttaaattataataacccttccccgaaactcaaccacccttgtaatactgagagaccaccaggctaggaggaggagaggagcctaaattctgctaaggtgtagacaaaaacaattgtgaggcgttattccagaagccacaagatatgcaacttcctcagttacccctgcagataatgttacttttgtagaacctaggattggccttctgagatatcttctcaggattttgcatgtctgatgaccgatggctccaccgggaccagccaacggcttctgtgtccccacccagaagcgactcagagaaagaggacagcttcgacaccctatgatttcatctctgacccaaccaatcagcactccccataccctagcctgctacctaccaaattacctttgaaaaatccctaacctccaagccttagatgagtttgatttgagtaataactctgcctcccacatggtgtggctggcatcatgtcaattaacctctttctttactgcagtgccatggtctccatgaactgatttttttgtgcagtgggcaggaagaacccatcgggcagctac

SEQ ID NO: 3298 - DNA, 1472 bp, Homo sapiens
  source 1..1472: mol_type = other DNA
gtggttttataatcagctataaaactttaaaaggtgctcttgaatgcaggtttctggtaactttggagattgtgacatcagaatagaggaaaaactttcgggactcatggagagctgaaatgttcatgaatatcaagcagaacaggaatgaactacatggactgaacttatagaagactaaagtaatctttttgactttttgcttaaaacgttgttgatcctttgttttgtttttttcagagtcaagaaacttttcttttgagctattgacagcttttaacaagttattatactcctatgaacaaaatttggagcatatttgtttctctctgcctgatttctcctgaatttggaaactatttgtgagtattcttaacttatcgtaatatagttatttgcataagtgcaataataatctgtttttatttgtaacaggacacaattgaagaaactggttattctaccatggctttgactggaatggtgtgctttcctttaaggaattaaacttgttttatgaagccagtaaaagccccttgggaaagctggccaaataccctgtctacacagtccctgaacagggttcctgatctgtggtaaataaagaatgtcactttctgacaggcccaggagccccaagttttacctcgggacctcaaaaggagaggaattcatgcaactcataggtatttgatggtacaaatccatggcagggctcagctttaaacaagtcttttctgagattccttctatggaataaagttccatcaaagtcaatttaaaagcctgtgtaaaaaaataattattcttgctgcactgtatacaaataatcaggccaagtataataaaggaaatcagtcgtaccatgatttgtctttagtaaaaatgagaaactggagagagaaaaactatgttttaaaaactatagtacacctgttgttagattctagtcttgcccaatgtttttcaatttttattattttctacagtttggaccaaattctagtttttcttggctacaagtcttcaatataacgttttcaattttttccctttcttttttctatttttcctaatttggagtcactgaaagctaagctgtgctttgtgaagccctgtgaactgaagctagacaacttaaacttcagaagaaaataacagcaacctgtttacatatataagctactttcatacctgcctactgatgtatggacttcagagtagtgtggcctatatcgattttctaggatcattattttgtttgttgtttttctcccttcctccacctattttctcttcataggacatgaggattctcaacctgataaaaatgagctttcctaataactcaagacccatctgcctaggaataaaccatcccagctgtgagagaccagacgaaacctgagaccagagactcgttttcttctaaaatgctttctccaaaagatttttaaacagaaaaaggggga

SEQ ID NO: 3299 - DNA, 261 bp, Homo sapiens
  source 1..261: mol_type = other DNA
caggtgtggtggctcataactgtatcccagcacttcaggagaggccaaggaaggaggattgcttgagcccaggagtttgaagccagcataggcaagagtcagaccctctctacaaaaaatttaaaaatgacccagggatggtggcatgagcctgtggtcccagctacttcaaaggccaagggaggattgcttgagcctttgaatgtgaggctgcagcgagcaccactacactccagcatgggcaacagagcaagactctgt

SEQ ID NO: 3300 - DNA, 353 bp, Homo sapiens
  source 1..353: mol_type = other DNA
aattatttttcaattcttcttactataaaaagttgaaagtctcaagtaggtgttaatagaacattaataacaatttaacttttctaatctccctattttataagacagagcagggttcaagcccagagtctggggcaggcacaaatatctacctaaaatgcaatgacttcaagttgctttcatcatagtaacgtttgctcttacttttcattgtttgccgttgacactggtgtttcatttaaggtaataaataaaaccttcattttaagttagtatattttgttagtaagccagttaaaatcttaagtgaattagaatttggcacaaagatatgacacaagtattgaagatgg

SEQ ID NO: 3301 - DNA, 460 bp, Homo sapiens
  source 1..460: mol_type = other DNA
ccttttgcaaggtgactttgtcacttctccccttaggaggtgaagtttatttcttcatccatagaatccaagcttagtcacgcaatttgtttggccaaggggatattagcaaatgtgatacaagcagagggtgagaagtgtttgtttgagctggttcactggataagtggcgttggcttgctatgattgtatggtgattgtcttctcttactgatgggaacccatccaccacgtgaagaagcctaggctaggctaatggtgagcaacaacagggggagaggatctggtcatcctgccaaggccccagacatgtgagtgagaccgtcctagaccacctggcccaagccaagtcagccaagacaagaagacctatccagaattataatgaataataaatgtctattgttttaagacattaagcatttgagttatttgttaagcagaagaagctaactgatac

SEQ ID NO: 3302 - DNA, 619 bp, Homo sapiens
  source 1..619: mol_type = other DNA
aatgaaaacttgaaagtaatatgttgaagagatactatgttgaagagattcccatgttgattgcagcattatttacaatagccaagatatagaatcaacctaagtgtccatcaacagatgaataaagaaaatgtggtgtatatatacacaattgaatagtactcagccataataagaatgaaatcctgtcattgtggtaacatggatgaatctagaggacaatatgctaagtgaaataagcaaggcacagaaagactaatatcccacgttctcactcatttgtggagtctgaaaaagctgatgtcacaaaagtacagagttattagtgactccggaatgtatcaaggaggggaggataggaagagattggtcaatgacataaaattacaattagacaggagaaataagttctggtgttctatagcatagttgggtgactatagtaaacagtattatagtttgtatttccaaataactagaagagaggatcctgagttctcaccacaaagaaataatgtttcaggagacggatatgcgaaagccaatgtacacatgtatccaatcattatgatgtactccatagatgtgtgtacttattgtgtatcaattaaaaacacaa

SEQ ID NO: 3303 - DNA, 231 bp, Homo sapiens
  source 1..231: mol_type = other DNA
cacaggtacagaatgtggaatgagcagagggtagtagggctttgcaggcttgcaggtttgggtttacattctgagcccatgattctctgttactttttggccttgtcagtctgaccttccatttgccttgtgtaaaacagtaataataccaaccttccaggttttttgaagggatcacaagagttttgtaaaacacctagcactgtgcctggtgctttgcactataaatat

SEQ ID NO: 3304 - DNA, 323 bp, Homo sapiens
  source 1..323: mol_type = other DNA
gccgggcacagtggcttttgcctgtaatcccaacactttgggaggacaggacagatcacttgaggtcaggagttccagaccagcccagccaacaggacagatcacttgaggtcaggagttcgagaccagcccagccaacatggcgaaaccatgcctctactaaaaatacaaaaattatggtgacgcctgcctgtagtcccagctactcgggaggctgaggcaggaggatcgcttgaacccaggaagtggagattgcagtgagcggagatcgcaccactgcactccagcctggtcgacagagtgagactcaatctcaaggaaaa

SEQ ID NO: 3305 - DNA, 297 bp, Homo sapiens
  source 1..297: mol_type = other DNA
cacaggtgtgttttgattagtttgcacagtgatgtctttgaaggcttgaatgaactcccatgtcttaaacattatgagttttaacattaatatgctgatttctgtcctttcttccaaaacttagaaagtctgacaagactagttctgctttggcacacagcaaaattcttccagagttgagcaaggctttcctgctttaaaacaatcctgtttttcagtgtaccaggccttaccactccctgttgtcttatacctctcctgatacctcatcccttagcatttaaatgtgtgaatcct

SEQ ID NO: 3306 - DNA, 54 bp, Homo sapiens
  source 1..54: mol_type = other DNA
ctcctccaactccagcgccaagaaccatgccggttagtaggcaaataaatattt

SEQ ID NO: 3307 - DNA, 169 bp, Homo sapiens
  source 1..169: mol_type = other DNA
cagtggctttcaactagaggcagtaacctgtcattccagaggatgctgagaaatgtgtaggggcacttttttggttgtcatatttactaggggcttctgttggcatttaagcctaaagacactcacccctgcagtgcatgggacagcctggcacaatgaagaattagcc

SEQ ID NO: 3308 - DNA, 3456 bp, Homo sapiens
  source 1..3456: mol_type = other DNA
ctcatcacacttattccaaaattgactacatagttggaagttaagcactcattagcaaatgtaaaagaacagaaattataacaaactgtctctcagaccatagtgcaatcaaattagagctcagggttaagaaactcactcaaaactgcacaactacatggaaacggaacaacctgcttctgaatgactactgggtaaataatgaaatgaaggcagaaataaagatgttctttgaaaccaatgagaacaaagacacaacataccagaatctctgggacacatttaaagcagtgtgtagagggaaatttatagcactaaatgcccacaagagaaagcaggaaagatctaaaatagacaccctaacatcacaattaaaacaactagaggagcaagaacaaacaccttcaaaagctagcagaaggcaagaaataactaacatcagagcagaactgaaggaaataaagacacaaaaaacccttcaaaacatcaatgaatccaggagctggttttttttaaaagatcaacaaaattgatagactgctagcaagactaatgaagaagaaaagagagaagaatcaaatagatgcaataaaaaatgataaaggggatatcaccaccgatcccacagaaatacagactaccaccagagaatactataagcacctctatgcaaataaactagaaaatctagaagaaatggataaattcctggacacatccaccctcccaagactaaaccaggaagaagttgaatcctgaatagaccgataaaaggctctgaaattgaggcaataattaatagcctaccaactaaaaaaagtctaggaccagagggattcacagccaaattctaccagagataaaaacaggagctagtaccattccttctgaaactattccaatcaacagacaaaggaggaatcctccctaactcattatatgagtccagcatcatcctgataccaaagcctggcagagatacaacaacaaaaaaagagaattgtagaccaatatccctgatgaacatcgatgcaaaaatcctcaataaaatactggcaaactgaatccagcagcacatcaaaaagcttatccaccacgatcaagttagcttcatccctgggatgcaaggctggttcagcatacgcaaatcaacacatgtaatccatcatataaacagaaccaaagacaaaaaccacatgattatctcaatagatgcagaaaagacctttgacaaaattcaacagccccttatgctaaaaactctcaataaactaggtatcgatgggacatatctcaaaataataagagctatttatgacaaagccacagccaatatcatactgaatgggcaaaaacagtttccctttgaaaactggcacaagaaaaggatgccctctctcaccactcctattcaagatagggttggaagttctggacagggccatcaggcaggagaaagaaataaagggtattcaattaggaaaagagtaagtcaaatggtctctgtttgcagatgacatggttggatatttagaaaaccccatcatctcagcccaaaatctccttaagctgataagcaacttcagcaatgtctcaggatacaaaatcaatgtgcaaaaatcacaagcattcgtacacaccaataacaaacagagagccaaatcatgagtgaactcccattcacaattgcttcaaacagaatagaatacataggaatccaacttacaagggatatgagggacctcttcaaggagaactacaaaccactgctcaatgaaataaaagaggacacaaacaaatggaagaacattccatgctcatgggtaggaagaatcaatattgtgaaaatggccatactgcccaaggtaattcatagattcaatgccattcccatcaagccaccaatgactttcttcacagaattggaaaaaactattttaaagttcatacggaaccaaaaaagagcctgtatagccaagacaatcctaagccaaaagaacaaagctggaggcatcatgctacctgacttcaaactatgctacaaggctacagtaaccaaaacagcatggtactggaaccaaaacagagatatagaccaatggaacagaacagagccctcagaaataacaccacacatctacaaccatctgatctttgacaaacctgacaaaaacaagcaatggggaaaggattccctatttaataaatggtgctgggaaaactggctaggcatatgtagaaagctgaaactggatcccttccttacaccttatacaaaaattaattcaaaacggattaaagacttacatgttagacctaaaaccataagaaccctagaagaaaacctaggcaatatcattcaggacataggcacgggcaaggacttcatgactaaaacaccaaaagcaatggcaacagaagccaaaattgacaaatgggatctaattaaactgaagagcttctgcacagcaaaagaaactaccatcagagtgaacaggcaacctacaaaatgggagaaaatttttgcaatctacccatctgacagagggctaatatccagaatcaaaaaaaacttaaacaaatttacaagaaaaaatcaaacaaccccatcaaaaagcaggcaaaggatatgaacagacacttctcaaaagaagacatttgtgcagccaacagacacatgaaaagatgctcatcatcactggccatcaaagaaatgcaaatcaaaaccacaatgagataccatctcacaccagttagaatggcaatcattaaaaagtcaggaaacaacaggtgctggagaggatgtggagaaataggaacacttttacactgttggtgggactgtaaactagttcaaccattacggaagacagtgtggtgatttctcaagggtctagaaccagaaataccatttgacccagcaatcccattactgggtatatacccaaaggattataaatcatgctactataaagacacatgcatacgtatacttattgcagcactattcacaatagcaaatactttgaaccatcccaaatgtccatcagtgatagactggattaagaaaatgtggcacatatacaccatggaatactatgcagccataaaaaaggatgagttcatgtcctttgtaggaacatggatgaagctgggaactatcattctgagcaaactatcacgaggaccataaaaccaaacaccacatgttctcactaatatgtgggaattgaacaatggaaacacttggacacagggaggggaacatcacacatcagggcctgtcatggggtggggggaggggggagggatagcattaggaggaatataattacattatttacctaatgtaaataatgagttaatgggtgcagcacagcaagatgacacatgtatacatatgtaacaaaccagcacattgtgcacatgtaccctagaacttaaagtataataaaa

SEQ ID NO: 3309 - DNA, 29 bp, Homo sapiens
  source 1..29: mol_type = other DNA
ctccttcatttgcaggacatcaagggctc

SEQ ID NO: 3310 - DNA, 646 bp, Homo sapiens
  source 1..646: mol_type = other DNA
gtaacacccatccaacttgtctccagctgcaaccttgcctcctactgtctatgatgaggagggcattcttaacccaacagcctgtaccatctttaaaaacatgtcagatcatgtcactgctccatttaaagcatccactggctcctatcttgagagtgaaagcaagtccttccagtggcttccaaggttccacatgccctggctccttcatcttatactatctctccctcaatcaccccacttcagcctcattggtcttcctgctcttccacacgcatgctgagagagaacttgctgttccctctgcctggaatcccagacatccacatgaattgctcactcatctcctgaagttctctattcaagtgtcactttttcctcaaggccttccctcacttccctatttaaaataactaccctttccccctaaagcaaatccaccctagtactctccatcctcctttttatttttctgtggcacttaccaccatatgacacactatttgtttattttctgtatctacccactagaatgacagttccatgagagtagaacttttgcctgttttattcactactatgtcttcaatgccttgaatagtttctggcacacacgaggcatttagtgtttgctaaatgaattaat

SEQ ID NO: 3311 - DNA, 89 bp, Homo sapiens
  source 1..89: mol_type = other DNA
gatcagactaaatgagtcttgccttctgttttagcctttgaaatccatggagcagaatggaccaggcctagagtacagagtgacctgga

SEQ ID NO: 3312 - DNA, 300 bp, Homo sapiens
  source 1..300: mol_type = other DNA
ggtcaggcgtggtagctcatgcctgtaatcccaacaccttgggaggccaaggcaggtggatcacttgaggcaagaggttcaagattaacctggccaacacggcgaaaccctgtctctacaaaaaatacaaaaaaatagccagacatggtggtgcacacctgtaatcccagctactcgggaagctgaggcacgagaatcacttgaacccaggaggcggaggttgcagtgagccgagatggtgccactgcactgcagccagggcaacagagcaagacactgtctcgggggaaaaaaaaagaa

SEQ ID NO: 3313 - DNA, 107 bp, Homo sapiens
  source 1..107: mol_type = other DNA
aagacaaagaaaataaagtgcacctttacagtgtaagagactcagaaatcacttcctaaattggtaatatagattgcaatataaaaataactagcaaagttagatta

SEQ ID NO: 3314 - DNA, 332 bp, Homo sapiens
  source 1..332: mol_type = other DNA
agtcagtccttcatatccatgggttttacatccatggattcaaccaacctcagactgaaaatattaggggaaaaaaatacatctgtactacacatgaacaaacttctctttcttgtcattattccctgaacaacacaggataacaactacttacatagcacttacattatattagatattataagtaatctagaaatgacttaaagtatatgggaggatacacataggttatttgcaaatactacactattttatatgagagacttgagcattcgcagatttcggtatccacgggaggtcctggaaccaatcccctatggataccaagggac

SEQ ID NO: 3315 - DNA, 776 bp, Homo sapiens
  source 1..776: mol_type = other DNA
ctcttaacaatccaggaatagagacatccttaaactgacatgcagaatagacgaaagaaatctccaacagacgtgacactaaatggtaaagacataaaaacctttgcaattaaaaataggaacaaacattgtaatcctagacaatgtaattagaccagaaaaaaaaatgcagaaaatagacaagaaagatgcaaagcaaatatacgcatgaatgatatgaaacatcacctaaaaaattaaacagaatgaaccaaaaaaacagaacgtcataagacattcaggagattgaatatataatcaatatatactcaataactttccaacacaatagcaaccaatcagaaaatgaattaaaacaatagcaacaaaaatataaagtactcagaaataaagccaataaaaaatgtacaagaccttagtggataaatagaaaactctgcctaaagacataacagatataaatacattttgtatgggaaaacactccttcaagatgtcagttttttctaaattaacatgcaaagtcaacaaaatcccagccaactacaatgtaatttttcatagagcttgataagcatactctaaaattcaaatgaatgagaaaaataatagttaagaaaactttttagatgtggaaagttttgttctaccagacaataaggcttaatataaagctgtagtacttgaaacagcatatattactgaagaaatataaatatgcaaactgtagataaaaggaaaagtacagaatcctgacacaggcttatacacatatg

SEQ ID NO: 3316 - DNA, 1275 bp, Homo sapiens
  source 1..1275: mol_type = other DNA
gaaccagaaatagactcacataaatggccaattgatttttgacaggggcaaaagcaattcaatggaggagggatcgccttttcagcaaatactgttggagtaattggatatccataggcagtaaaccaacaacttcaggacctaggactgagctaagaaggctcagatgactcaaaagcatgctccttagaaggaaaaaaaatgttaaattggacttcatcaaaattaagataatttaccctgtaagagacctttttacaaagatgatattacaggttgggaaaaaatatttgcaaatcatatccaacaagggatttgtatgtaaactacataaagaactttccaaatttaacagtaataagtaaatacaattagaaaataagcaaaagacagacatttcactgaagtatagatagcaaataagcaaatgaaaagatgttcaacatcattaggcatgagggaaatgcagagtaaaatcgtgagatatcacctatcagaatagcttaactttttttttttaatggtggtaactgctggcaaggatgaagagaaacaggatctcatacattgctgggaatgtaaaatggtacagccactctggaatataatttggcagtttcttgtaaaaccacacatgtatatgtcatgcttcaggaattgcacttctgagcatttatcccagagaaatgaaaacttgcgttcacacaaaaacctgtatacgaatgttcatagcagctttatttgtaatggtcgaaacctgtaggcaacccatatatccttccttaggtggttaaaacaaattgtggtttatgtattaccatggaatacttgttactctgcaataaaattgacttattgatatccataacaactcaaataaatttcaagggaattaatgctgagtgaaaataatcacaaaaggccatattctgtatgaaaatattcatataacattctcaaaatgataaaactatagagatgaaaaatggattaatggttgccaaaggttagggatggtgggaggaaaaatggggagagggttggatggaactattaaaaggtagcaccagaaaggtctttgtggtgatggaacacttgtgtatcttgattgcagtggtggttacacaaatctataggtgctatacctatacacacatactgtaccaatgttgatttcctttttcattttatgtaagatgtaaccatgaggggaaagtgggtgaagggtgctatctttgcaacttcctgtgattctatcatttcaaaataaaaagt

SEQ ID NO: 3317 - DNA, 1959 bp, Homo sapiens
  source 1..1959: mol_type = other DNA
cagtcatgtgccacataattatgttttggtcaacaacagaccacatatttgatggtagtctcataaggtaatggagctgagaaattcctatggcctagtgactctgcagctgtcataatgtggtagcacaatgcattactcacatgtttgtggtgatgctggtgtaaagctgaccatgttgccagttatataaaaggatagcacatgcagttatgtacagtgcataatacttgataaataaatgactgtgttactggtttatgtattttactgtgcttttcattgttatttcaaagtgtgctccttccacttattttttcaaagtttactgtaaaacagtatgctgtgtttgaccagcagcagcctcatctatctcatgtttaccacatctcttgactgcatcatttcctcttgtgcttgatttaatctcatgttttgttcatcatgtctcctaagcattcaaaatccatggctaattttgccagtaagaggccatgctgagtaattgacctggaaacaaaattaaaagtgattaaggactgtgaaggtggaaaatcagggatggttattgctcaccagtcaggcatgtcccgttttaccatagctgccatcctaaagaacaagagcaaagtgatagaagctgttaaaggatctgcttcattgaaggcaatgagactaacaaaaatttgagaagggccaatatcagatatggataatatctgatattgacctagattgaagaccagacacacaagcatgtccctcagcaccatgacaatcacagctaaagcaaaaagcttgtttgttacgtagatagaaaaggctggacctgactatattgttgaatttattgctagctctgggtggtttaaatgattcgagaattgttactcattacacaattgtgaaagtgagtgctaagtctacaagtgctgatgtgaaggcagctgaataatttttggaaactctagataagctgattgtgggggaaaattacttgccagagcaaatctttaatatggatcaaggctccctattctggaaaaagatgccggaagggactgtcatccataaagaggccaagtcagtggcaggtttcacggctttgaaggactggctaacaatgtttgggggcgatgttgctggccacaaattaaaaccctttgtgatttgacacagtgagaaccccagggccttcaagcatatcagtaagcacacactgccggtgtactacatgagcaataacaagtcatggatgacccagcttctcttccaatatgccctcctgaattgctatgccagtgaaatggagaagtactgtttggagaataacatacctttcaagattttgcttgttgttgataatgctcctgtacatccttttattggtgatctttgttttaatatcaaactggtgtttctccctctaaacatcaactctttgatccaaccagtggatcaaggagttagagcagtttttaaggctcactacctaaagcggacgttgccccaggctattgctgctattatctgagggagacactgagaagacactaatgcaattctgggaggattacagcatctaagactgcatcaagaaccttgcttaggcttagggtgatgtcaccaatgagtgtatgaatggcatctggaaggagacactcgaggtttgttcatgacttcagaggatttgccatggatgaccaggttgcaaaaatccacaaggctgtggttgagatggcaaacagctttaacctgggtgtgaatgaggatgacattgaggagctcctagcggtggttcctgaggaattgactaatgagttgttggaaatagaacagggacacagctgaagaagaggcaagagaaaacaaaactgcagaaaaccaccatcaagaaaatttgcagtagggagtttagcagaagcttttgcagacctcaagaaactccttaaaaagttt

SEQ ID NO: 3318 - DNA, 682 bp, Homo sapiens
  source 1..682: mol_type = other DNA
aataacagcagaggtaggaatgggagttagcgggattgcaacttccctatcctattaccaacgcttgtccaaggattttatggaaagcctggataacattgctcaaagtattgtcaccttacaaattcggataggctccttggcagtggtcgctttgcaaaatcgaaggggactagatctcctaactgctgaaacaggtggcttatgtattttcctagaagaagaatgctgttttgatgtcaaccaatcaggattagtaagggacaccacctgaaaactagctgactgggcctctaaaatatgacaacagctggggcacctaaagggcactaagttgggtttcatggctccctcccttggccagcccattattaatgattatatttgccttggtttttggaccatatctgttaaatcttttaaccaaatccatttccttttgcctagagaccaccaagttagatgatcatgtgacaagatttctagccagtttcaggagaagacaccaccggccatcaagaagctaccctgtctcccctagacaaagcagggtgagagttacgtgatctccaataggtagggactgtgtcccaagttagcatgaagcagttacagaagaaagaccctcagtctctcagcctcccataaagatttacgaggatcacgtctctcagggggaaaa

SEQ ID NO: 3319 - DNA, 345 bp, Homo sapiens
  source 1..345: mol_type = other DNA
tgaaattatctgtagctattaatgtcaggtttttgaaatttactgacctggaagaatactcgtaatgcaatgtcaagtgagaagcaggacaaagaacatttgcaatacagttgtatttataaaattttgtttacacacaaaaaatgtattttgcttaaaaatataatttacatatatatacaaccacacaagggaaataacaaaatgttaatactagctaatttctatagagttggcattttaagtcagaggggtattgatgaatagatgtagtttattaaatttttttctctatttcctaaactttctataaagaacttgtagtatctttataataggaaaaaa

SEQ ID NO: 3320 - DNA, 199 bp, Homo sapiens
  source 1..199: mol_type = other DNA
gagaactgtccaagggttgggaaaatccaaattctcttcctggttccagcactgattttgtacataaacattaggcaggttgcttaacctttttatttcaaactctctcaactctaaagtgctaataataatctcagttaccttatctttgtcacagggtgttcttttttatgaagaaaaatttgaaaatgataaaagc

SEQ ID NO: 3321 - DNA, 71 bp, Homo sapiens
  source 1..71: mol_type = other DNA
ctctctggagaggtttcctcacctgtaacacgaagggctccgactggtgatcccaaagccccctctagttc

SEQ ID NO: 3322 - DNA, 165 bp, Homo sapiens
  source 1..165: mol_type = other DNA
attgttttttgtcatattttggtcaaaaagttgcagttgcattggcccaattctatttttcccataagctctcttataatattatagatgtgtgatttttttctttttattttataggtatgtgattttacagaaaacatacatagagttacagcagacgtgctt

SEQ ID NO: 3323 - DNA, 75 bp, Homo sapiens
  source 1..75: mol_type = other DNA
tccagcgggggtggcataaggatatctccgccctgttccctctaacacttactgaggactttcatgtagacatgg

SEQ ID NO: 3324 - DNA, 953 bp, Homo sapiens
  source 1..953: mol_type = other DNA
gccaaatttctcactttcagagaaagaagcaaggaagagaatgctagaatgaactctgtggtgctggatcagcatcagagatatcagtataaactcatgtttatatttatatacagacagatacggaagtaaacgaagatatgtgtgggtcagtatatatatatattacttcctaactatcccctgagagggcctagaagcagtgataccctagcagtaatgagtgcatcaagctcatttagaaaccagatagtggtttccaaatactcttctccaacagaaggaaccaggacaccttggagaaatggctgattttagggttggggcaggtaaagtacaagatgagactggggcatcttacagtgccaggaagtacaaaagtgctaaaagacaaagaaaggtagggaaaggtatttcaaaagaacataggtgccaatgttagaatggccaaagctggaacaacttgagcaacaaaatacagtactggattataagcaaagaaaaaaatattcatgggtccatgttgacataaatgatttaataaataaatgggggaggcataaatcttccttacaaaaggattccaaatcataaaagtagaaagaattagaaaaatagaaaaccaacagaataatataatcaacgctgccgcaggcaagattcactaatgaatgctaaaataagtagaggaaatttttaaggagaaatcagattctgtataacctcacagttatcttccccaaaatattaactaattactttaggaattttaacatgcccacaaattctttgatactcctcccttcaggggttggagcttaattcccttcccccagaatatggatatgacttggtgactcatttctaggttctatcaagtaaaattaaaaagcagaacaacagtcactttacagtgcagaacatcactttaatcaagttatcaaagttaacaa

SEQ ID NO: 3325 - DNA, 288 bp, Homo sapiens
  source 1..288: mol_type = other DNA
ggccgggcacggtggctcacgcctataatcccagcactttgggaggccgaggcaggcggatcacaaggtcaggaattcgagaccagcctgaccaacatggtgaaaccccatctctactaaaaatacaacaattagccaggcatggtggtgcatgcctgtaatcccagctactcagaggctgaggcaggagaattgcttgaacctgggaggcagagggtgcagtgagccgagatcgtgccattgcactccagcctgggcgacattctgtctcaaaaaaaaaaaaaaaga

SEQ ID NO: 3326 - DNA, 306 bp, Homo sapiens
  source 1..306: mol_type = other DNA
ggctgggcgcagtggctcacacctgtaatcccagcactttgggaggccgaggcaggcagatcacgaggtcaggagatccagaccatcctggctaacacgtgaaaccccatctctactaacaatacaaaaattagctaggcatgatggcatgcacctgtaatcccagctactcaggaggctgaggcaggagaactgcttgaactcgggagacggaggttgcagtgagcagagattgcaccactgcactccagcctgggcaacagagcgagactcaatctgaaaaaataaaaaaataaaaaataaaaa

SEQ ID NO: 3327 - DNA, 289 bp, Homo sapiens
  source 1..289: mol_type = other DNA
gccaggcatggtggctcacgcctgtaatcccaacactttgggaggctgaggcaggcagatcacgaggtcaggagttcgagaccagcctgaccaacatggtgaaaaccccatctctactaaaaatacaaaaattagccgggtgtggtggcacacaccagtaatcccagctactcaggaggctgaagcaggagatttgcttgaacctgggaggcagaggttgcagtgagccaagattgcgccgttgtactccagcctgggcaacagagcaagacccatctcaaaaaaaaaa

SEQ ID NO: 3328 - DNA, 134 bp, Homo sapiens
  source 1..134: mol_type = other DNA
gggtcgggggatggctgcaggctgatcccagctgtgtatgttcctacaggctgtgtcacctcaggaggcagctgctgggccccagtgtatgcatctgtgcaaggagggaatgaggggcttgggcgggatctaag

SEQ ID NO: 3329 - DNA, 293 bp, Homo sapiens
  source 1..293: mol_type = other DNA
ggccaggagcagtggctcacgcctgtaatcccatcactgggaggccgaggagggtggatcacttgaggtcaggagttcaaggccagcctggccaacgtggtgaaaccccgtctctactaaaaaatatacaaattagctgggcatggtggtgtgcacctgtaatcccagctacttgggaggctgaggcaggaggatcgcttgaaaccgggagtggaggttgcacggagccaagatcacaccattgcactcaagcctgggtgacagagcaagactctgtctcaaaaaaaaaaaaa

SEQ ID NO: 3330 - DNA, 492 bp, Homo sapiens
  source 1..492: mol_type = other DNA
atatggatccagaaaccccactactgggtatacatcaaagggaaatgaaatcagtatgttcaagagacgtctgctttcccagttcactgcagcactgttcacaatagccaagatatggaagcagcttggtgtccactgatagatgaacggatagaggaaatgtggtgcatatacataacagagtaccattcagccttaaaaaaggaggaaatcttgtcatttatgaaaacatgggtgaacccggtgcacattatgctgagtgaaataagccaggcacagaaagacaaacactgcatgatctcacttacatgtggaacctataaaagctgcccttatacaagtaaagagtcaaatgctggttaccatgggctgggaggagagggactgggcagatgtgtcaaagaatacaaaatttcagttaggaggcataagttcagggatcttgtacagcatggtgactatagttaacaacaacgtattgtattcttgaaa

SEQ ID NO: 3331 - DNA, 55 bp, Homo sapiens
  source 1..55: mol_type = other DNA
ccagtccccaggccatggactgccacactgtaggtcttcaatcaaggttcagtgg

SEQ ID NO: 3332 - DNA, 283 bp, Homo sapiens
  source 1..283: mol_type = other DNA
ggccaggtgcagggctcacacctgtaatcccagcactttgggaaggtcacttgagctcaggagttcaagaccagcctgggcaacatagtgagaccttgtctctggaaaacaattagctgggcatggtggtacacacctgtagtcccagctacttgggaggctgaggcgggaggatggctttagcccaggaggttgaggctcctgtgaaccctgatggcaccactgcactccagcctgggtgacagggtgagaccctgtctcaaaaaaaaaaaaaaaaaaaaaa

SEQ ID NO: 3333 - DNA, 2691 bp, Homo sapiens
  source 1..2691: mol_type = other DNA
agttgacccttgaacaacacaggtttggactgcgcagagccacttacacctggattttttcaatacatatattggaaaattttttggagatttgtatcactttgaaaaaacttagatgaaactcggatgaacttttcaattaaaatattgaaaaaaatgaagaaaaaggtatgtcataaatgcagaaaatgtatacagatactagtctactttatcatttcctaccataccaatagttaactattttaactattaaaagttaaaaatttatcaaaacttaaacacacacataccaactgtacatggcaccattcacagttgagagaaacgtgagcataaagatgtggtattaaatcataactgcatacaattaattgcagtgcgtactgtcctgctgtgaataatttcctagccacctcctgttgctactgtggtgagctcaagggttgcaagtatcgacttaaaacaccctgtgatgctaaccatctccaaacgagcagttcctgtctccagtaaattacatatcacagtaaaaagtatctccagtggttctctggtatttttcgtgtttagtgcaatatcgtaaaccttcaataacaccttaggacccatacgaagtgccactagtaatgctggcagtgctcccaagaagcagtgtcatgaaaaaaagcaaaaaaaacttttttttttcattacaagaaaaaaagccaaattgcttgatatgtaccataaattgagggtctgcagctgtgattgttcaccatttcaagataaatgaatccagcgtaaggaccatagtcaaaaaagaaaaaaattcatgaagccatcactacagctacaccagcagacatgaaaaccttgcacattttgcagaataccttttaatcttgtattgaaaatgtagcttttatgtgggtgcaggattgctgtaagaaaggcatatctgtagactctaatatgatttgagaaaaagcaaagtcattatatgacaacttaaagcaaaaggaaggtgaagcatctaaagctggagaatttaatgccagtaaaggatggtttgataatttttaaaagtggtttggcttaaaaactgtcaagataacaggagaagcagcttctgctgaccaagaggcagcaggtgagttcccggatgccattaagaaaatcactgaggagaaaggatacctgcctgaacaggttttcagtgcagatgaaagtgtcctcttctgggaaaaaaatgctacaaaggacattgattagtaaggaagagaagcatgcatcaggatttaaggcaggaagggacaggctaactggactgctttgtacaaatgcaattgggtttatgatcaggactggccttatctataaagctgctaaccccctggccttgaagggaaaagataaacaccagctgccaatcttttggttgtacaataagaaggcctggacactgagaaaacttttctggattggttccactgatgctttgtccctgaagtcagaagtaccttcccaggaagcgactgccttttaaagttcttttgatattggacaatgcccccagccacccagagccccatgagttcaacactaaagtcctcagagtggtctccttgcccccaaacacatcataatttggcctctagattgggaggccataaggaccttcaaggctcattacacacagtactttatggaaaggattgtcaacactatggacgagaacaccaacagagagaacaacatggaagtctggaagaattacatcactgaagatgccatcattgtgacagagcaagccatgaaagccatcaagcctgaaacaataaattcctgcaggagaaaactgtccagatgatgtgcatgacttcacaggatttacaacagagccaatcaaggaaagagattgtagatgtggcaaaaaaggtggggggtgaagggtttcaagatacggatcttggagaaattcaagagctaacagataaccacactagaggaacaaagagaagacaacctgctggagacgagtgcttccccatcagtgtgaggtgatgatgaagacgacacagaagcagcagcatcagaaaacaaatcgacattaaacaatctggcaggtttctgattagtcaagactgcttttcacttcttttgtaacacagacccttctatgatacaagcattaaacctaaagcaagtggtggaggaaggattggtaccatatacaaatatttttagaaaaatgaaaaagcaaaaaagccagaaattatgatgtctttctgtaaagttacactgaggcgcccacctctcctgcctcctcttccaccgcttctgcctctgccacccctaagtcagcaagactaaccccttcctcctcttcctcgtcagcctactcaacaagatgatgacaagaataaagacctttctgatggtccacttccatttaatgaattagtaaatatattttctcatgattttaattacatttttttctctagcttactttattataatacagcacataatacacataacatgcaaaatatgtgttaattggctgtttatgttattggtaagacttccagtcaacagtaggctattagaagttaagttgtgggaaaatcaaaggttataggagattttcaactgcatgcagggccggtgcccctccccactgtgttgttcaagggtcagctg

SEQ ID NO: 3334 - DNA, 317 bp, Homo sapiens
  source 1..317: mol_type = other DNA
gccaggagcagtggctcaagcctgtaatcccagcactttgggaggctgaggcaggcagatcatgaggtcaggagatcaagaccatcctggctaacacagtgaaaccctgtctctactaaaaatacaaaaagttagttagttagttagccaggcgtggtggtgggtgcctgtagtcccagccattcgggaggttgaggcaggagaatggtgtgaacctgggaggcagagcttgcagtgagattgcaccactgtactccagcttgggcgacagagcgagactccatctccaaaaaaaaacaaaacaacaacaacaaaaa

SEQ ID NO: 3335 - DNA, 5520 bp, Homo sapiens
  source 1..5520: mol_type = other DNA
gctttgaagagagtagtggttctcccagcatggagtctgagatctgagaacggacagactgcctactcaagtgggtccctgacccccgagtagcctaactcggaggcatcccccagtaggggcagactgacaccccacacagccgggtacccctctgagacgaagcttccagaggaacaatcaggcagcaacatttgctgtttagcaatattcatggttctgcagcctccgctgctgatacctaggcaaacagggtctggagtggacctccagcaaactccaacagacctgcagctgagggtcctgactgttagaaggaaaactaacaaacaggacatttgcaccaaaaccccacctgtacatcaccatcatcaaagaccaaaggtagataaaaccacaaagatggggaaaaacacagcagaaaagctgaaaattctaaaaatcagagcgcgtctccccctccgaaggaacgcagctcctcaccagcaacagaacaaagctggatggagaatgactttgatgagttgggagaagaaggcttcagacgatcaaacttctccaagctaaaggaggaagttcaaacccacgcaaagaagtaaaaaaccttgaaaaaagattagatgaatggctaactagaataaccagtgtagagaagtccttaagtgacctgatggagctgaaaaccacagcacaagaactatgtgacgaatgcacaagcttcagtagccgattcgatcaactggaagaaagggtatcagtaatggaagatcacatgaatgaaatgaatcaagaagtttagagaaaagagtaaaaataaatgacaaagcctcgaagaaatatgggactatgtgaaaagaccaaatctacgtctgattggtgtacctgaaagtgatggggagaatggaatggagccacgttggaaaacactctaaaggatattatccaggagaacttccccaacctagcaaggcaggccaacattcaaattcaggaaatacacagaacgccacaaagatactcctcaagaagagcaactccaagacacataattgtcagattcaccaaagttgaaatgaaggaaaaaatattaagggcagccagagagaaaggtcgggttactcacaaagggaagcccatcagactaacagctgagctctcggcagaaactctacaagccagaagagagtgggggccaatattcaacattctcaaagaaaagaattttcaacccagaatttcatatgcagccaaactaagcttcataagcaaaggagaaataaaatcctttacagacaagcaaatgctgagagattttgtcaccaccaggcctgccctacaagagctcctgaaggaagcactaaacatggaaaggaacaagcagtaccagccactgcaaaaacatgccaaattgtaaagaccattgatgctaggaagaaactgcatcaagtaatgagcaaaataaccagctaacatcataatgacaggatcaaattcacacataacaatattaaccttaaatgtaaatgggctaaatgctccaattaaaagacacagactggcaagttggataaagagtcaagacccatcagtgtgctgtattcaggagacccatctcatgtgcagagacacacataggctcaaaataaaggcatggaggaagatctgccaagcaaatggaaaacaaaaaaaggcaggggttgcaatcctagtctctgataaaacagactttaaaccaacaaagatcaaaagagacaaagaaggccattacataatggtaaagggatcaattcaacaagaagagctaactatcctaaatatatatgcacccaatacaggagcacccagattcataaagcaagtccttagagacctagaaagagacttagactcccacataataataacgggagcctttaacaccccactgtcaacattagacagatcaatgagacaggaagttaacaaggatatccaggaattgaactcagctctgcaccaagtggacctaatagacatctacagaactgtccaccccaaattaacaaaatatacattcttctcagcacatcacacttattccaaaattgatcacatagttggaagtaaagcactcctcagcaaatgtaaaagaacagaaattataacaaactgtctgtcagacaacagtgcaatcaaactagaacgcaggattaagaaactcactcaaaaccgctcaactacatggaaactgaacaacctgctcctgaatgactactgggtacatagcaaaatgaaggcagaaataaagatgttctttgaaaccaatgagaacaaagacacaacataccagaatctctgggacacatttaaagcagtgtgtagagggaaatttgtagcactaaatgcccacaagagaaagcaggaaaggtctaaaattgacaccctaacatcacaattgacagaactagagaagcaagagcaaacacattgaaaagctaacagaaggcaagaaataactaagatcagagcagaactgaaggagatacagacacaaaaaaatccttcaaaaaaatcaatgaatccaggagctgtttttttgaaaagatcaacaaaattgatagactgcaagcaagactaataagaagagagagaagaatcaaatagacgcaataaaaaatgataagggggatatcaccaccaatcccacagaaatacaaactaccatcagagaatactataaacacctttatgaaaataaactagaaaatctagaagaaatggatacattcctggacacatacaccctcccaagactaaaccaggaagaagtcgaatccctgaatagaccaataacaggctctgaaattgaggcaataattaatagcctaccaaccaaaaaaagtccaggaccagagagattcacagccgaattctaccagaggtacagggaggagctggtaccattccttctgaaactattccaatcaacagaaaaagagggaatcctccataactcattttatgaggccagcatcatcctgataccaaaggctggcagagacacaacaaaaaaagagaattttagaccaatatccctgataaacatcaatgcaaaaattctcaataaaatactggcaaaccaaatccagcagcacaccaaaaagcttatccatcataatcaagtaggcttcatccctgggatgcaaggctggttcaacatacgcaaatcagtaaacgtaatccagcatataaacagaaccaaagagaaaaaccacatgattatctcaatagatgcagaaaaggcctttaacaaaattcaacaacgcttcatgctaaaaactcttaataaattaggtattgatgggacgtatctcaaaataatcagagctatttatgacaaacccacagccaatatcatcctgaatgggcaaaaactggaagcattccctttgaaaactggcacaagacggggatgccctctctcaccgctcctattcaacatagtgttggaagttctggccagggcaatcaggcaggagaaataaataaagggtattcaattaggaaaagaggaagtcaaattgtccctgtttgcagatgacatgactgtatatttagaaaaccccatcatctccgcccaaaatctccttaacctgataggcaacttcagcaaagtctcaggatacaaaatcaatatgcaaaaatcacaaacattcttatacaccaataacagacaaacagagagccaaatcatgagtgaactcccattcacaattgcttcaaagagaataaaatacctaggaatccaacttacaagggatgtgagggacctcttcaaagagaactacaaaccactgctcgaggaaataaaggaggacacaaacaaatggaagaacattccatgcttatggataggaagaatcaatatcgtgaaaatggccatactgcccaaggtaatttatagattcaatgccatccccatcaagctaccaatgactttcttcacagaactggaaaaaactaccttaaagttcatatggaacccaaaaagagcccgcattgccaagacaatcctaagccaaaagaacaaagctggaggcatcacgctacatgacttcaaactatattacaaggctacagtaaccaaaacagcatggtactggtaccaaaacagagatatagaccaatggaacagaacagagccctcagaaataatacacatctacaaccatctgatctttgacaaacctgacaaaaacaagaaatggagaaaggattccctatttaataaatggtgctgggaaaactggctagccatacgtagaaagctgaaactggatcccttccttacaccttatacaaaaattaagtcaagatggattaaagatttaaatgttagacctaaaaccataaaaaccctagaagaaaacctaggcaataccattcaggacataggcatgggcaaggacttcatgtctaaaacaccaaaagcaatggcaacaaaagccaaaattgacaaatgggatctaattaaactaaagagcttctgcacagcaaaagaaactaccatctgagtgaacaggcaacctacagaatgggagaaaatttttgcaatctactcatctgacaaagggctaatatctagaatctacaaagaacttaaacaaacttaacaggaaaaaaacaaacaaccccatcaaaaagtgggagaaggatatgaacagacacttctcaaaagaagacatttatgcagacaacagacacatgaaaaaatgctcatcatcactggccatcaaagaaatgcaaatcaaaaccacaatgagataccatctcacaccagttagaatggcaatcattaaaacgtcaggaaacaacaggtgctagagaggatgtggagaaataggaacacttttacactgttggtgggactgtaaactagttcaaccattgtggaagatagtgtggcgctttgtcaaggatctaaaactagaaataccatttgacccagccatcccattactgggtatatacccaaaggattataaatcatgctgctataaagatgttatagcatgcccacgtatgtttatcgcggcactattcacaatagcaaagacttggaaccaacccaaatgtccatcaatgagagactggattaagaaaatgtggcacatatacaccatggaatactatgcagccataaaaaagggtgagttcacgtcctttataggggcatggatgaagctggaaaccatcattctcagcaaactatcacaaggacaaaaaaccaaacatcgtatgttctcactcataggtgggaattgaacaatgagaacatttggacacaggaaggggaacatcacacaccagggcctgttgtggggtggggggaggggggagggatagcattaggagatatacctaatgtaaatgacaagttaattggtgcagcacaccaacatggcacatgtatacatatgtaaccaacctgcacattgtacacatgtaccctagaacttaaagtataataataaaaaaaga

SEQ ID NO: 3336 - DNA, 307 bp, Homo sapiens
  source 1..307: mol_type = other DNA
gctgggcccggtggctcatgcctgtaatcctggcactttgggaggctgcggcaggcggatcacttgaggtcaggagtccaagaccagcctggccaacatggtgaaaccccatctctaccaaaaaaaaaaaaaaaaaaaaagtgcaactagctgtgcttggtgacttggccctgtagtcccagttgcttgggaggctgaggtgggagaattgcttgggcctgagagctggaggttatggtgagaaactgagattgcaccactgcactgtagcctgagtgacagagcgagaccctgtctcaagaaagaa

SEQ ID NO: 3337 - DNA, 368 bp, Homo sapiens
  source 1..368: mol_type = other DNA
ttccagtctcctttgcagcttaggatggctatgtgatcaggtgtggccaatgaaattgaagaggaagtctacctgggcttctgggaaagcttttccaataaaagacacaggcatggctaacacctccctgggcctcttcttcctaccttgattgagggtgtgatgcctggagccacagcagccactttgctaccatgacaaaaaggccaagagaatcacagagtcattgaccctatcattatttcaccaagccaataccagccgccatccttctccagaattcttgtaaataaaataaatccctctttgtttaaaccattgttggtcagtctctgttacttgcaaccaaaatcatccctaactgacac

SEQ ID NO: 3338 - DNA, 212 bp, Homo sapiens
  source 1..212: mol_type = other DNA
tccataaaggtggcagtggggtcttcaaaccactgtttctattccagaagcctactgaaaatcattgtatatttgctttccataagactaggaaaaagtaaaaaaaaaaaatttttttttttttttttttttttttggctagaattgcatcgtaacagtgtggtcacactggtaagaaatgcagattggcaatcatgtacatctctgattaa

SEQ ID NO: 3339 - DNA, 152 bp, Homo sapiens
  source 1..152: mol_type = other DNA
cctgctgctcacagcatggtcctcacaccagcagcctccgccttacctgggagcttgttagaaatgcaggatctcccagatctattgagttagaagctgtattaacaagatccccagtgatttttatgcacaatcaagtttgtgaggcaccg

SEQ ID NO: 3340 - DNA, 232 bp, Homo sapiens
  source 1..232: mol_type = other DNA
gcacaacagacagaacacagatttcagcttcagagtttggctcagattcaagctctttccttcaccggctgtgtgatttggggaaatcagatgacttccctgaacttcagtttccttgactgtaaaaagaggataataacagtacccacctcttcagtctgtcgtaagaatttcatatttcatgagatatggctgctaggtgcttagcacagtgcatggcacatagtgcacg

SEQ ID NO: 3341 - DNA, 2643 bp, Homo sapiens
  source 1..2643: mol_type = other DNA
tcatagcaaaattctacctgatgtacaaagaagagctggtacaattctactgaactattccaaaaaattgaagaggagcaactcctcccaaactcattctgtgcatcaccctgataccaaacctgacaaacacacaataaaaaaaaagaaatcaacaggccaatatccctgatgaacatagaggcaaaaatcctgaacataataccagcaaaccaaattcaacagcacatcaaaaggttaatttactatgatcaagtaggcttcattctggcatgcaaatttggtccaacatgagcaaatacaaatgtgattcaccacataaataggatttttaaaaagccttagaatcatctcactagatgtagaaaaagcttttgctataatccaacatcccttcatgataaaaaacttcaagaaagtaggcactgaagaacatacctctaaataataagagccatctatgataaaaccacagccaatatcatactgaatgggcaaaaactgaaagcattacccttgcgaactggaacaagacaaagatgcccactcttactactcctattcaacatagtactggaagtgctagccacagcaatcaggcaagagaaagaaataaaatgcatcttaataggaaaagaagaaatcaaactatctctctttgcagacaatatgattctattcctaaaaaactcaaagacgccaccaaaagcctcctagaactcagaaacaacttcagtaaagtttcaggtcattaaatcaatgtatagaaatcagtagcatttctgtacaccaataatgttcaacttgcgagccaaatcaagaaggaaatctcatttacaatagcctgaaaaaatagaagtatataaaatacttaggaatacatctaaccaaggagatgaaatatatctacaaggggaaccacaaaacactgctaaaagaaatcatagaagacacaaacagatggaaaaacattccatgctcatggattggaagaatcaatttcattaatgtggccatactgcccaaaataatctacaggttttatacaggtagtttataaaactactctaccatatttcacagaactggaaaaaactattataaagtacatgtggaatcaaaaaagagactgaatagccaaagcaaacttaaacaaaaagaacaaagctggaggcacacattttccaactccaagctatactacaaggctacagtaaccaaaccagtatagtactggtacaagacagacacagaaaccaatggaacagactagagaacccagaaataaagctgcacacttacaaccatctgatcttcaacaaagttaacaaaagcaatggagaaaggtttccttatttaataaatggcgctgggataactggctagccatatacagaagaatgaaactggacccctacatttcaccatatacaaagctaactccatatggagtaaagatttaaatgtaagaactcaaagtatgagaatcctagaggaaaacctaggaaacaccattctggacatcagccttgggaaagaatttatgactaagtcctcaaaagcaattgcaacaaaaccaaaaattgacaagtgagactaatcaaaccagagagcttctgcacagcaaaagaaactgtcaacagagtaaacaacctacaggatgacagaaaatattcacaaattacacaaccactaaaggtctaatatctggagtctataaggaacttaaatgattgaacaagcaaaaaccaaccccattaaaaagtgggcaaaagacatgaacagaaacttctcaaagggagacagacatacaagtggccaacaaacatgaaaaaatgctcattgtccctaatcatcagagaaatacaaatcaaaaccaccatgagataccatctcacaccagtcagaatggctaaagtaaaaaaaaaaaaaacaacaaaaacaaaacaaaactaaacaaacaaaaaaaaaccacatgttggtgaggctgctgagaaacaggaatgcttatacactgttggtgggaatgtaaattagttcggccactgtggaaagcagtttggtgatttcccaaagaacttaaaacagaactaccattcgatccagcgattccattactgtgtatagatccaaaagaaaacaaatcattctaccaaagacacatgtacttgcatgttcattgtcacagcactattcacaatagcaaagatatggactcaacctaggtgcccatcaatggtggatcagataaagaaaatttggtacatgtatatcatgggatattatgcagtaataaaaaagaatcgaatcatgtcctttgcagccacgtggatgcagccagacaccattatcctagcaatttaatgcaggaacagaaaactaaatgccacatgttctcacttgtaagtaggaactaaactttgggtacgtgtggacgtgaagatggtaacaatagacactggggactactagagcagggaagaagggagaggggaaaaggttgaaaaaccaaatggtgagtactatgctcagtacctgggtaatgctaccattcatatcccaaacctcagcatgatgcaatatacccaggtaagaaacatgcaaatataccccctgaatctaaaatgaaacttgaaaaaataa

SEQ ID NO: 3342 - DNA, 891 bp, Homo sapiens
  source 1..891: mol_type = other DNA
acagtgtgagacagaaataaaatcatggtatagataagggtttaagatacagaatatatacggttcaacaagaagacaactcagttaaaagatgactgaaggacttcaatcaacatctctccaaagacaatatacggtcggctgataagcacatgaaaagatgtccaacatcattagtcattaatataatgcaaatcaaaaccacaatgagatactgcttcagacctactaagatggttataattttaaaaactggaaaataaatgttggtaaggatgtggagaaactggaatttctgtgcattgctggtgacaatgtaaaatggtgcagccactttggagcactgtttggcagtttctctaaaagctaaacagaattaccatatcatccagtaattccactcctaggtatatatgcaacataattgaaagcagagattcaaacataattgtacgccaacattcactgaagcattatccacagtagtgaaaaggtaaaaacaacccaaattccgtcaacagataaaaatggataaacaaaatgtggtatatacatgcagtgaaataatagccacaagcaaagtcctgacacatgctacaacagaaattagccttggaaacatattaggtgaaataagcagacacaaaggacgaatattgcatgattccacttatatgaagtatctagactaggcagactcatagagacagacagtaaattagaggttaccaggggctgaggggaggagaaatggggaattattatttatttggtgtagagtttctgtttaacatgatgaaaaagttttgtgacgagatagtggtgatgattgcatgatattgtgaatgtacccagtgccactgaattgtacacttaaaaatggttaaaatg

SEQ ID NO: 3343 - DNA, 1108 bp, Homo sapiens
  source 1..1108: mol_type = other DNA
aaatgtcagaataaggacctccaaaaatctgcacctccattaaaacaaggaaaacacctggaaaaatggtcaaaagcaactttttcagaattctggaaaaccaaaggcttacaacaatccatggattgttgattcaagcaaatagcaacatctcagaaatgtgagctttgtggtattttaacttatccaaagccccattcttccctccccagctccatggtagccttgaaacccagcagcctagcaaccactcaagggtcagaatgggctccccaaaagccccatcctcagaactgacaccatgtggcctatctggcagcaacacggaaagccccattcacaggatttgcattgatttgccctgatctagtttgccgagcaggagaagccctagccccagggcacatgactacaacaatcagtagccactgttcaacagcgcagctgtctgaggggacaatacccatggggcaaacaagcagctggccaaaaaactataaaggaaaatgtggggaatacagtgttaatggtgggctttgaaaaggtccaatacattcctggggatctagacagccacatgcaggtgcaaggccatgtgcacacccaggaaagacgtgagggggtcctcatttgtcacctgtggctgagcatgactgtctacacaaataggaagtgatggcacaccccaacacaaacacacaagccgtcggtaaaggataggagacagtggttgtggtgacttctctgtccaaccattagctaaccactaaactaaacaagcagggacttaaggggacggactttatatagcctttgtccaggaaaagtcactaggcaagctgtaacaataaacagcaacagcagcaaatcctgggggaggagaaagggaatatccaatttccagagttgccacattattttattttaaatgcccaattttcaacaaaatattatgaaacactcaaacaggaaaaaaagcagtcaacagaaactgtctctgagggagcccagacttagattcactaaataaactttttaaatcggcaattataggcatattcaaacacctcaaggaaaccatgtcttaaaaaaaatatcgaaggatagt

SEQ ID NO: 3344 - DNA, 305 bp, Homo sapiens
  source 1..305: mol_type = other DNA
gctaggcatggtggctcacacctgtaatcccagcattttgggaggccgaggccagcgattgcttgagcccaggtgttcgagaccagcctaggcaacatgatgaaaccctgtctctacccccaaaaaatacaaaaattagccaggcatggtggtgcacacctgtagcctcagctgctcaggaggctgaggtgggaaaattgcttgaacctgtgaggcaaaggttgcagtgagtcaagatcacaccactgtactccaacctgggtgacagattaagaccctctcaaaaaaaaaaaaaaaaggaaaaa

SEQ ID NO: 3345 - DNA, 102 bp, Homo sapiens
  source 1..102: mol_type = other DNA
aacttgttaaaggaaacatccagggcccctgcaactggctttctgggcagaaccattcttgtggtggaatcaacttgccatccttgttctaataagcctttc

SEQ ID NO: 3346 - DNA, 5191 bp, Homo sapiens
  source 1..5191: mol_type = other DNA
gcaggggtctctttgccctcacataagattccagaacactactgctgtggtccgagtgtttgtccctcacataggatttcaaaacactgctgctgtggtctgcttgtccctcacataggattccagaacactgctacaagggtctgaatgtttgtccatcacgtaagattccacagcactgctgctggggtctgagtgattgtccctcacataggattccaaaacactgctacgagggtctgaatggtttgtcccccgcataggattccagaacaccatggcgagggtctgaatgtttgtccctcacataggcttccagaccactcctgctgtggtccgaatgtttttccctcacttaggattacagaacactgctagtgtgttctgaatctttgacccttacatagaattccagaacactgctgctgggttccaagtgtctgtccttcatataggattccagaacacttcaacgagggtctgaatgtttgtccctcacataggattcaacaacactcctgctgtggtctgaatgtttgtccctcacatacgattccggaacaccgctgctgggttctgagtgtttgtccctcacataggactccacaacactgctgctgtggtctgaatatttcttcctcacataggattccagaacactgccacaagggtctgaatatctgtccctaacataggattccagaacattcctgctgtggtctgaatgttagtccctcacataggattccaaaacactgctgctggattctgagtatttcccctcacttaggattccagaacactgccatgagggcctgaatgattgcccctcactaggactccagaacaatgctgctggagtctgaatgttgatacctcacataagactccagaacaatcctgctgtggtctgaatgtctgtgactcacataggattccagaacactcctgctgtggtctgaatgtttgtccctcacataggattccagaacactgctgttgggttctgagggtttgtccctcacataggattccagaatactgctacgagggtctgaatgtttgcccctcacacaggatgcctgaacactgctgctggggtctgaatatttatctctcacataggattccagaacactgctacgagggtctgaatgtttgtccctcacataggataccagtaccctgctgctagggtctgaatgttcctccctcaaataggatactagaacactgctacaagggtctgaatgtttgtccctcacataggattgcagaacactcctgctgtggtctgaatgtttgtctctcacataggattccagaacactgctggtgggttctgagtttctgtcactcacaaaggatcccagaacactgctatgagggtctgaatgtttgtccctcacataggattacagaacactgctgctggggtctgaatgtttgtccctcacataggattccagaactatgttacgagagtctgaatgtttgccctcacacaggattccagaacactcctactgtggtctgaatgcttgttcctcacatacaattccagtacactcctgctgtggtctgaatccttgcccctcacataggattccagaacactgctgctgggttctgagggtttgctcctcacataggattccagaacactgctacgagagtccaaatgtttgcccctccaacaggattccagaacactgctgctggagtctgagtgtttgtccctcacataggattccagaacactgttacgagggtctgaatgtttgaccctcacataggactccagaacactcctactgaggtctgaatgtttttccctcacataggattccagaactcccctcctgtggtctgaatttctccctcacataggattccagaacaatgctgctgtgttctgagtgtctgtccctcacataggattccagaagactgctatgagggtctgaacgtttgtccctctcatgggattccagaacactgttacgagggtttgaatgtttgtccctcacataggattccagaacactcctactgtggtctgaaagtttgtccctcacacaggattccagaacactcctactgtggtctgaatgtttgtccctcacacaggattccagaatactgttgctgggttctgagtatttgttcctcacataggattccagaaaactgctatgagggtccgaatgtttgcccttcaaatagtattccagaacactgctgctggtgtctgaatgtttatttctcacaaaggattccagagcactgctaggagtgtctgaatgcttgtccctcacataggattccagaactctcctgctgtggtctgaatgtttgtaccccatgtagtactcaagaacactgctgctggggtctgaatgtttgtccctcacataggattccagagcactgctaggagcatctgaatgcttgtccctcacataggattccagaactctcctgctgtggtctgaatgtttgtaccccatgtagtactcaagaacactgctgctggggtctgaatgtttgtccctcacataggattccagaacactgctgctggggtctgaatgtatgtccctcacataggattccagaacactgctgctgggttctgagtatttgtccctcacataggacaccagaacacgcctgttgtggtctgaatgtttatccctcacataggattccataacactcctgctgtggtgtgaatgtttgtccctcacataggatttcagaacactcctgctgtgttctgaatatttgccctcacataggattccagaacactgctgttgggttctgagtgtttgtccctcacataggattccagaacaatgctatgactgtatgaatgtttgtccctcagataggatttgagaacactgctgctggattctgagtgtttctccctcacgtaagatttcagaacactactacgatggtatgaatgattttccctcacacaggattccaaaacactgctgctgggatgtgaatgtttgtccctcacatgggattccagaacactgttatgagggtctgaacgtttgtccttcacatatgattccagaacactcctactgtgatcttaatgtatgttcctcacatgggattccagaacactcctgctgtggtctgactaaccctcacataggactctagaacactcctactgtggtctgaatatctgtcccccacatagcattccagaacactactgctgggtactgagtgtccctcacataggaatccagaacactgctacgagggtctgaatgtttttccctcacataggattccagaacactgttgctgggttctgagtgtttgtccctcagataagattccagaacacggctacgagggtctgaatgtttgtccctcacataggattccagaacactgctgttggggtctgaatgtttgtccctcacataggattccagaacactgcttcgagggcctaaatgtctgtccctcacataagattccagcacactgctatgcggttctgaatgtcctcacataggattccagagcactcctgctgtggtctgaatatttgtccctcacatgggattccagaacactgctacgagggtctgaatgtccctcacataggattccagaacactcctgctggggtttgaatgtttgtccctcacacaggattccagagcactctgctgtggtcttaatgttttttaatcacataggattccagaacactgctacaagggtctgaatgtttgtccctcacataggattccagaacactcctgctatggtctgaatgtttgtccctcacataggattctagaacattcacattggggtctgaatgtttgcccttaacataggatttcagaacactgctcctggggtctgaatgtttgtccttcaaataggattcaagaacactcctgctgtggtctgaaagtttgtccctcacataggattccagatctctcctgctgtggtctgaaagtttgtccctcacataggattccagaacactgctgccatggtctgaatgtccctcacataggattccagaacacttttgctggtgtctgaatgtttatacctcacataggattccagaacactgctatgagggtctgaaagtttgtccctcacataggattccagaacactgctgctagggtctgaatatctgtccgttacataggattccagaatactgctgctgggttttgaatgtctgtccctcacatagaattccagaacactgctgcgagtgtctgaatgtttgtccctcacatgggattccagaacactgctgcgagggtctaaatgtctgtccctcacataacattccagcacactgctatgaggttctgaatgtttgtccctcacataggattacagagcactcctgctgtggtctgaatttttctccctcacataggattccagaacactgctgctgtggtctgaatgtttgcctctcacataggattcctgaacactgctacgagggtctgaatgtttgtccctcacataggattccagaacactgctgctagggtctgaatatctgtccgttacataggattccagaatactgctgctgggttttgaatgtgtgtccctcacatagaattccagaacactgctgcgagtgtctgaatgtttgtccttcacataggattcctgaacactgctacgagggtctgaatgtttgtccctcacataggattccagaacactcctgctggggtctgaatgtttgtccctcacataagattccagaacactgctgtgtgatctgaatgtttgtccctcacataggattccagaacacttctgctgtggtctgatagtttgttcctcacataggattccagaatactgctacaaggttctgaatgtttgtccctcacataggattccagaacactgctacaagggtctgaatgtttgtccctcacataggattccacaacacaactgctgggatctgaatgttcgtccctcacataggattccagacacggctacgagggtctgaatgtttttcccgcacacaggattctagaacactccagctggggtctgagtgtttgtccctgacataggattcctgaacactgctgctgccactagagtcgttgcgagtgtctgaatgtttgaccttcac

SEQ ID NO: 3347 - DNA, 846 bp, Homo sapiens
  source 1..846: mol_type = other DNA
ccttcagaaaagttacctcaaaattaattacagacctaaatgtaaaacataaaaatataaaacttccagaaaacggcacaagagaaaatctagatgaatttggatttgtcaatgactttttagatatggcatcaaaggcaagatctaggaaataaaaaattgataaaatggactttgttaaaataaaaactatatgctacatgatagatgtctagcgaatgaatagacaaacacgggctgagagaaaatatttgtaaaagatctactagataaaggactgttatgcaagtatataaagaaccctaaaatctcaacagcaaaaaaaaatctgattagaaattgtgtcagagactttcacaaacatcttatcaaagaagatgtgtacatggcaaataagcatatgaaaagatgctccatatcatatgtcgtcaggtaaatgcaaatcaaaacaatgagataccgttgcacatctattagactgggcaaaatacagaacaacaccaccaccaaatgctgacaaggatgtggatcaacaggaactgtcattcactgttggggagaagataaaatggtacagccacttggaaaggcagtctggcagttcctttcaaaactaaacatacttttatgatgcaatgtagaaattccactgtttggcatttacctaaaggagctgaaaagcaacaacaacaacaaaactgcacacagatgtttatagcagctttattcataatgttgccaaaactacgaagtaactgacatgtcaataggtgaatagatagatacactatatggacttgtgttacatccaatgtaatattattcagcacttaaaaaggagctatc

SEQ ID NO: 3348 - DNA, 3304 bp, Homo sapiens
  source 1..3304: mol_type = other DNA
ggtcactggcaagatggctgaataggaacagatctggtctgcagctcccagcaagatcaatgcagaaggcgggtgacttctgcatttccaactgaggtatctggctcatctcattgggactggttagacagtgggggcagcccacggagggtgagctgaagcagggtggggtgtcacctcacctgggaagtgcaaggggtcagggaactccctcccccagccaaaggaagtcatgagggactgtgccatgaggaatggtgcattccagcccagatactatgcttttcccacagtcttcacaacctgcagaccagaagattccctcagatgcctatgccaccagggccctgggtttcaagtgcaaaactgggcagctgtttgggcaaacacagagctagctgcaggaggtttttttcataccccagtggcaccggggatgccagctagacagaatcgtttactcccctgagatgggggctgaagccagggagccaagtggtctagctcagtggatcccatccccacgaagcccaacaagctcagatccactggcttggaattctcatggccagcacagcaatctgaagttgacctgggatgctggagcttggtgggggcaaggggcatccgccattactgaggcttgagtaggcagttttcccttcacagtgtaaacaaagcccccagggaagttcaaactgggtggagcccacaacagcttggcaaagccactgtcgccagactgcctctctagattccttctctctgaaacaaaggcagtagccacagtcaggggcttatagataaaactcccatctccctgggacagagcacttgggggaaggggcagctgtgggcacagcttcagcagactgaaacgttcctgccagctggctctgaagagagcagcagatttttcagcacagcatttgagctctactaagggacagactgcctcgtcaagttggtcactgacccttgtgcctcctgactgggagacacctcccagcaggagtcaacagatacttcatacaggaaagtttcagctggcatctggtgagtgcccctctgggataaagcttccagaggaaggaacaggcagcaatctttgctgttctgcagcctccattggtgatacccaggtaaacagggtctggagtggacctccagcaatctccagcagacctgaggcagagggggcctgactgttagaaagaaaaataacaaacagcaaggaatagcatcagtgtgaacaaaaaggacatccacagaagaactccatcccaaggtcaccaacatcaaagaccaaaggtagatcaatccacaaagattgaggaaaaaccagcataaaaagactgaaaattccaaaaacacagaacttctcttttacttcaaaggatcacaactccttgccagcaagggaacaaaactggatggagaataagtttgatgaattgacagaagtaggcttcagagtgggtaatgacaaatttctccgagctaaaggaacatgttctaacctaatgcaaggaagctaagatcattggaaaaaggttagacaaatttctaactagaataaccagtttagagaagaaaacaaatgagctgacggagctgaaaaacacagcacaagaactttgcgaagcatacacaagtatcaatagctgaatcgattatgtggaagaaaggatatcagagattgaagatcaacttaatgaaataaagcaagatgacaagattagagaaaaaaagaatgaaaaagaatgaacaaagcctccaagaaatatgggactttgtgaaaagaccaaatctacatctgattggtgtacctgaaagtgacggggagaatggaacaaagttggaaaacactctgcaggatattgtccaggagaacttccccaatctagcaaggcaggccaacattcaaatttaggaaatacacagaacaccacaaagagatactcctcaagaagagcaaccccaagacacataattgtcagattcaccaaggttgagatgaagaaaaaaatgttaagagtagccagagagaaaggtcaggttacccacaaaaggaagcccatcagactaactgtggatctctgcagaaaccctacaagccagaagagagagggggacaatattcaatattcttaaaagaactttctactcagaatttcatatttagccaaactaagcttcttaagtgaaggagaaatgaaattctttacagacaagcaaatgctgagagattttgtcaccaccaggcctgccttagaagagctcctgaaggaagcactaaatatggaaaggaacaactggtaccagccactgcaaaaacatattagattgtaaagaccatcgacactatgaagaaactgcatcaactagcaggcaaaataaccagctatcctcataatgataggatcatattcacacataacaatacttaccttaaatgtaaatgggctaaatgccccaattaaaagacacagactggcaaagaagggtcttgataaagagtcaagacccatcagtgtgctgtattcaggaaacctatctcatgcaaagacacacataggctcaaactaaagggatggaggaatacttacaaagcaaacggaaagcaaaaaaaaaaaaaaaaaaaaaaacaggggttgcaatcctagtctctgataaaacagactttaaaccaacaaagatcaaaaaagacaaagaagagcattacataatggtaaagggatcaattcaagaagagctaattatcctaaatgtatatgtacccaatacaggagcacccagattcataaagcaggttcttagagacctacaaaaagacttagactcccacacaataatagtgggagatttaacacgccactgtcaatattagatcaacaagacagaaaattaataaggatattcaggacttgaattcagctctggaccaagcagacatctacaaaactctccaccccaaatcaacagaatatacattcttctcagcaccacatcacacttattctaaaattgaccacataattggaagtaaaacactcctcagaaaatgcaaaagaacggaaatcataacagtttctcagaccacagtgcaatcaaattagaactcaggattaagaaactcactcaaaactgcacaactacatggaaactgaacaaccggctcctcagtgactactgggtaaataacaaaattaaggcaggaataaataggtcctttgaaacagtgagaatgaagacacaatgtagcagaatctctgagacacagctaaagtagtgttcagaggga

SEQ ID NO: 3349 - DNA, 311 bp, Homo sapiens
  source 1..311: mol_type = other DNA
ctgggtgcagtggctcacgcttgtaatcccagcactttggaaggtcgagacaggtgcatcgcttgagtccaggagtttgagacaagcctaggcaacatggggaaactctgtttctacaaaaataaattaaaataattagctttgggtggtggcccctccctgtagtcccagctactcaggaggctgaggccggaggatcacttgagcccaggagaaggaggctgcaatgagcttagatcatgccactgcactctagcctgggtgacagagtgagattctgtctcaaaaaagcaaacaacaagaaaaaaaaa

SEQ ID NO: 3350 - DNA, 295 bp, Homo sapiens
  source 1..295: mol_type = other DNA
gctgggtgtggtggctcacgcctgtaatcccagcactttgggaggccgaagctggccgatctttggagccctggagttcgagaccagcctggtcaatatggcgaaaccccgtttctacaataaaataaacgggcacggtgacgcacgcctgtagtccaagctacttcggaggctgaatcagtaggatcacttgagcctgggaggcggaggttgcagtgagccgatatcgctgcactccctgagtgacacagtgcaaccctgtctcaaaaaaaaaaaaaaaaaaaaaaaagaaaaa

SEQ ID NO: 3351 - DNA, 300 bp, Homo sapiens
  source 1..300: mol_type = other DNA
gctgggcgcggtggctcttgcctgtaatcccagcactttgggaggctgaggtgggcagatcacctgagatcgggagtttgagaccaagcctgaccaatatggagaaaccctgtctctactaagaatacaaaattagctgggcatggtggtgcatgcctgtaatcccagctacttgggaggccgaggcaggagaattgcttgaacccgggaggcagaggttgcagtgagctgagatagcgccattgcactccagcctgggcaacaagagcaaaactctgtctcaaaaaaaaaaaaaaaaaa

SEQ ID NO: 3352 - DNA, 166 bp, Homo sapiens
  source 1..166: mol_type = other DNA
aagaaataaatggtttcagtacaagctcttatactcacttggcatcaaaatagtccaaaataaatctgagaaccacggcaagttatagctgtgttaataacaaaatgtgatatttactatttaaattcagcagctgggagaatccccttataaggaagacagaaaa

SEQ ID NO: 3353 - DNA, 623 bp, Homo sapiens
  source 1..623: mol_type = other DNA
gaggtctgcgaggtcaaaactattgtcatgatagcaagatgcctgtctttttcatttattctcacggtgtgcagaggctacatgatgtgtgatgacatcctcattgatgttaatgaatggtgctatacttgaattttctaaggtgtcattaggtaggtttaggtatgcatacttgtttttagaaattatttttttcctttttcccatttttagaaatcaactcattttttaggttatgccttcagtaatctttgcaacctcaatattgtgtaatggttactttaaaatactgtagttttctttgtgcctaagtataaacataagtacattttgttgttttgtttgcaatagtggtttaaatattttcccaaaatatccaaatttaaaaattctacaactttagaatttaataaatttattctaaaatatttatatattttttcatttaagaatggatcggcttaaaaagactgcttctcatttacttactggctataccatctgtatactaataaaaaacaagatttgatttggaaggactgactcaaactaacgaaaatatgaaacctgtctttctgctttggagatatttacctaatcatgttctgcagtagaataattta

SEQ ID NO: 3354 - DNA, 300 bp, Homo sapiens
  source 1..300: mol_type = other DNA
ggctgggtgtggtggctcacacctgcaatcccagtactttaggaggccgagactggtagatcatttgaggtcaggagttcaagaccagccttgccaacatggtgaaaccccacctctaccaaattagccaggtgtggtgcacacctgtagtcccagctacttgggaagctgaggcaggagaatctcttgaaccagggaggaggaggttgcagtaagccgagatggcgcccctgcactccagcctgggtgacagagtgagaccttgcgtttaaaaaaaaaaaaaaaggaaaaggaaaaaaa

SEQ ID NO: 3355 - DNA, 349 bp, Homo sapiens
  source 1..349: mol_type = other DNA
catcccctggctccagagatggtcacatgacccaggcctggccagtcaaagtagtctctcccctggccacagtaattggtcatgtgatgcaagccagcttactagcactttgagaatgagtctcctgttgagctggtaggatgtaagcctggagctaatggcgatcatctttgccaccacctggggagagcctgcttgggaatgaaattaacacaaaggaagtccaacctgagaaatggccaaatatatttcctgataacattatgtggccctctggatccagccatgcctgaggtctacccctgggcttttggattatgtgtacagttggttcatccctttttctgct

SEQ ID NO: 3356 - DNA, 97 bp, Homo sapiens
  source 1..97: mol_type = other DNA
tctgaaaaatggggataacaatagtacctacctccctgggatgttctgaggattaagagatgatgcccgtcaagagcccagttcagtgtctggcaca

SEQ ID NO: 3357 - DNA, 3276 bp, Homo sapiens
  source 1..3276: mol_type = other DNA
aattgaccacatagttgaaagtaaagcactcatcagcaaatgtaacagaaaagaaattataacaaactgtctctcagaccacagttcaatcaaacaagaactcaggattaagaaactcactcaaaaccactcaactacatggaaactgaacaacctgctcctgaatgactactgggtacataatgaaatgaaggcagaaataaagattttctttgaaaccaatgagagcaaagacacaacataccagaatctctgggacacattcaaagcagtgtgtagagggaaatttatagcactaaatgcccacaagagaaagcaggaaagttctaaaattgacaccctaacatcacaattaaaagaactagagaagcaagagcaaacacattgaaaagctgcagaagtcaagaaataactaagatcagagcagaactgaaggagatagagacaaaaaacccttcaaaaaatcagtgaatccaggagctggttttttgaaaagatcaacaaaattgatagactgctagcaagactaataaagaagaaaagagagaagaatcaaatagatgcaataaaaaatgataaaggggatatcaccaccgatcccacagaaatacaaactaccatcagagaatactacaaacacctctatgcaaataaactagaaaatctagaagaaatggataaattcctggacacatacaccctcccaagactaaaccaggaagaagttgaatccctgaatagaccaataacaggctctgaaattgaggcaataattaatagcctaccaaccaaaaaaagtccaggaccagacggattcatagccgaattctaccagaggtacaaggaggagctggtaccattctttctgaaagtattccaatcaatagaaaaagagggaatcctccctaactcattttatgaggccagcatcatcctgataccaaagcctggcagagacacaacaaaaaaaagagaattttagaccaatatccctgatgaaaatcgatgcaaaaatcctcagtaaaatactggcaaaccgaatccagcagcacgtcaaaaagcttatccactgtgatcaagtgggcttcatccctgggatgccaggctggttcaacatatgcaaatcaataaacgtaatccagcatataaacagaaccaaagacaaacactacatgattatctcaataaatgcagaaaaggcctttgacaaaattcaacaacccttcatgctaaaaactctcaataaattaggtattgatgggacgtatcccaaaataataagagctatgtatgacaaacccacagccaatatcatactgaatgggcaaaaactggaagcattgcctttgaaaactggcacaagacagggatgccctctctcaccactcctattcaatatagtgttggaagttctggccagggcagtcaggcaagagaaagaaataaagggtattcaattaggaaaagaggaagtcaaattttccctgtttgcagatgacatgattgtatatttagaaaaccccatcatctcagcccaaaatcttcttaagctgataagcaacttcagcaaagtctcaggatacaaaatcaatgtacaaaaatcacaagcattcttatacaccaataacagacagagagccaaatcatgagtgaactcccattcacaattgcttcaaagagaataaaatacctaggaatccaacttacaagggatgtgaaggacctcttcaaagagaactacaaaccactgctcaatgaaataaaagaggacgcaaacaaatggaagaacattccatgctcatggataggaagaatcaatatcgtgaaaatggccatactgcccaaggtaatttatagatcaatgccatccccatcaagctaccaatgactttcttcacaaaattggaaaaaactactttaaagttcatatagaaccaaaaaagagcccacattgccaagacaatcctaagccaaaagaacaaagctggaggcatcacgttacctgacttcaaactatactacaaggctacagtaaccaaaacagcatgatactgggaccaaaacagagatatagaccaatggaacagaacagagccctcagaaataataccacacatctacaaccatctgatctttgacaaacctgacaaaaacaagaactggggaaaggattccctatttaataaatggtgctgggaaaactggctagccatatgtagaaagctgaaactggatcccttccttacaccttatacaaaaattaattcaagatggattaaagacttaaatgttagacctaaaaccataaaaaccctagaagaaaacctaggcaataccattcaggacacagacatggacttcatgtctaaaacaccaaaaacaatggcaacaaaagccagaattgacaaatgggatctaattaaactaaacagcttctgcacagcaaaagaaactaccatcaaagtgagcaggcaacctacagaatgggagaaaatttttgcaatctactcatctgacaaagggctaatatccagaatctacaaagaactcaaacaaatttacaagaaaaaaaaacaaccccatcaacaagtgggcgaaagatatgaacagacacttctcaaaagaagacatttatgcagccaacaaacacatgaaaaaatgctcatcatcactggccatcagagaaatgcaaatcaaaaccacaatgagataccatctcacaccagttagaatggtgatcattaaaaagtcaggaaacaacaggtgctggagaggatgtggagaaataggaacatttttacactgttggtaggactgtaacctagttcaaccattgtggaagacagtgtggtgattcctcagggatctagaactagaaataccatttgacccagccatcccattactgggtatatacccaaaggattataaatcatgctgctatagagacacatgcacacgtatgttcattgcagcactattcaaaatagcaaagacttggaaccaacccaaatgtccatgaatgatagattgaattaagaaaatgtggcacatatacaccatggaatactatgcagccataaaaaatgatgagttcctgtcctttgtagtgacatggatgaagctggaaaccatcattctcagcaaactgtcccaaggacaaaaaaccaaacaccgcatgttctcactcataggtgggaattgaacaatgagaacacttggacacaggaaggggaatatcacataccaaggcctgtcatggggtagggggagcag

SEQ ID NO: 3358 - DNA, 173 bp, Homo sapiens
  source 1..173: mol_type = other DNA
cactggaaagtgagggtgggggctctgcagtcagacaaacctaagatcacatcctggacaggccacttgcttgctgtgtggcattgggcaagtaactttacctctctggacttgtgataataaaagttcctacctcatgttatggttttgaggatttgctaagaaagtaaatg

SEQ ID NO: 3359 - DNA, 127 bp, Homo sapiens
  source 1..127: mol_type = other DNA
gctgggcacagtgactcacacctgtaatcccaacacttctggaggccaaggcaagaggatcacttgagcccaggagttcgagaccagcctgggcaaaatagaccccatctctggaaaaacaacaaca

SEQ ID NO: 3360 - DNA, 3413 bp, Homo sapiens
  source 1..3413: mol_type = other DNA
gcggctggcaagatggctgaataggaacagctctggtctgctactcccagggagatcaacgcagaaggcgggtgatttctgcattttcaactgaggtacactgctcatctcattgggactggttagacagtgggtgcagcacacgggggacaagccaaagcagggtggggcgtcgcctcacctgggaagtgcaagaagtcagggaactccctcccttacccaagggaagcagagaagggccatgccctgagggatggtgcactctggcccagatactattcttttcccacggtcttcacaacctgcaaaccaggagattccctcgggtgcctgtgccaccagggcccagggtttcaagcacaaaactgggtgaccatttgggcagacaccaagctagctgcaacagcttttttttcacaccccagtggcacctggaatgccagcgagacagaaccattcactcacctgaaaagaaggcttaagccagggagccaagtggtttatctcagtggatcccacccccatggagcccagcaagctgagatccacgggcttgaaattctcacagccagcacaacagtctgaagtaaacagttacacttgaccttagagagaggagcgtctgccattactgaggcttaagtagatggttttcccctcacagtgtaaacaaagctgccaggaggttcaaactgggtagagcccactgtagctcggcaaagccactgtagccagattgcctctctagattcctcctctccgggcagggcatctctgaaagaaaggcagaaaccccagtcaggggcttatagataaaactcccatcttcctgggacagagcacctgggggaaggggttactgtgggtacagcttcagcagacttcaacgttcctgcctgacagctctgaagagagcagcagatctcccagcacaccgctcaagctctgctaagggacagactgcctcttcaagtgggtccctgacccctgtgcctcctgactgagagacacctcccagtaggggccaacagatacctcatacaggagagctccagctgacatctggtgggtgcctctctgggatgaaacttccagaggaaggaacacgcagcaatctttgctgttctgcaacctccactggtgatacccaggcaaacagggtcttgactggacttccagcaaagtccagcagacctgcaccagagggccctgactgtaagaaggaaaactaacagacagaaaggaatagcatcaacatcaaaaaaaaaaaaaaaaaaaaaaaaaagagacttccatacaggaaccccatctgaaggtcaccaacatcaaagaccaaaggtagataaatccacgaagttgaggaaaaaccagtgcaaaaaggctgagaattccaaaaaccagaaaggctcttctcctccaaaggatcaaaactcctcgccagcaagggaacaaaaccagatggagaatgagtttgatgaattgacagaagtaggcttcagaaggtgggtaataacaagtaagctaaaggagcatgttctaacccaatgcaaggaagttaagaaccttgaaaaaaggttagaggaatttctaactagaataaccagtttagagaagaacgtaaatgactgatggagctgaaaaacacagcatgagaactttgtgaagcatacacaagtatcaatagccaaatggatcaagcagaagaaaggatatcagagactgaagatcaacttaatgaaataaagcatgaagacaacattagagaaaaaagaatgaaaaggaactaacaaagcctccaagaaatataggactatatgaaaagaccaaacctacatttgattggtgtacctgaaagtggcggggagaatggaaccgaattggaaaacacttttcaggatattatccagcagaacctctccaacctagcaagacaggccaacattcaaatccaggaaatacagagaacaccactaagatactcctcgagaagagaaacaccaagatagacaatcatcgtattcaccaaggttgaaatgaaggaaaaaatgttaagggcagccagagagaaaggtcggattacccacaaagggaagcccatcagacaacagtggatcttttggctgaaaccctataagccagaagagagtgggggacaatattcaacattcttaaagaaaagaattttcaacccacaatttcatatctaaccaaataagcttcataagtgaaggagaaataaaatcctttcccaacaagcaaatgctgagggatttggtcaccatcagacctgccttacaagaactcctgaaggaagcactaaatatggaaaggaaaaaacgataccggccactgcaaaaacataccaaattgtaaagaccttcgacactatgaagaaactgcatcaactaatgggtgaaataaccagctagcgtcataatgacagaatcaaattcacacataacaatattaaccttaaatgtaaatgatctaaatgccccaattaaaagaacagactggcaaattggatacagagtcaagacccattggtttgctgttttgaggagacagatttcatgtacaaagtcacacataggctcaaaataaagtgatggagaaatacttaccaagcaaatagaaagaaaaaaaaaagcaggggttgtaatcctagtctctgatgaaacagactttaaaccaacaaagataaaaaaagacaaagaaggcctttacataatggtaaagggatcaatttaacaagaagaactaactattctaaatatatatgcacccaatacaggagcacccagattcataaagcaagttcttagagacctacaaagagacttagattcccacacaataatagtgggagactttaaaaccccaccgtcaatattacacagatcaacaagacagaaaactaagaagaatattcagggcttgaactcagctctggaacaagtggacctaacagacatctatggaactctccaccccaaatcaacagaatatacattcttctcagcaccacatagcacttattttaaaattggccacataattggaagtaaaacactcctcagcaaatgcaaaggaacacaaatcataacaaacagtctctcagaccacagagcaatcaaattataattcacgatgaagaaactcactcaaaaccacacaactacatggaaactgaagaacttgctcctgaatgaatactgggtaaataaataaattaaggcagaaataaataagctatttgaaaccaatgagaatgaagacacaacataccagaatctctgagacacagctaaagcagtgtttagagggaaatttatagcactaaatgcccacaggagaaagcagaaatgatcaaaaatcgacaccctaacatcacaattaaaagaaatagagat

SEQ ID NO: 3361 - DNA, 320 bp, Homo sapiens
  source 1..320: mol_type = other DNA
accacattttctgggctcccttgcaggtcacagtgtccatgtaactaactcctggttaagaggatatggatagaaggcacatgttcaacttctggcttctgtccttgaaaagtgtgatgattccatcctttgctgtcttccttcccgctgactggaatgtggacttggtagtgagctaccttggactatgtggatgaagacaaagataaaaggaaccaaggactctgatgattctgtagagaagaggaaccgtagctgctcaaacgttcatgtgaaagaagaataaactatcagatttaagccactgctattttgggtct

SEQ ID NO: 3362 - DNA, 311 bp, Homo sapiens
  source 1..311: mol_type = other DNA
gccgggcgcggtggctcactcctgtaatcccaacgctttgggaggccgaggcgggcggatcacgaggtcaggagatggagaccatcctggctaacacggtgaaaccccgtctctactaaaactacaaaaaaattagccgggcgtggtagcgggcgcctgtagtcctagctactccggacgctgagggaggctgaggcgggagaatggcgtgaacccgggaggcggagcttgcagtgagctgagatcgcgccactgcactccagcctgggcgagagagattccgcctcaaaaaaaaaaaaaaaaaaaaaaaa

SEQ ID NO: 3363 - DNA, 170 bp, Homo sapiens
  source 1..170: mol_type = other DNA
gtggttctcaaaatgtttcttgagataacaatctcagcatcatttaggaaattctttgtaatataagttgtcaggccccatcccagtcctgagtcaaactggcatggagcccagtcacctatattaaaacaccctccaagtgattctgatgaatagtgaagattgagaac

SEQ ID NO: 3364 - DNA, 360 bp, Homo sapiens
  source 1..360: mol_type = other DNA
gcaatggcctatttgtatcaccccagagtcatgtgttgacatcctaacctgcaatatgatacattaggaggtggggcctttgggaggtaatcaggtcataagggtagtgccctcatgaacaggattagtgtccttataaaaagacacatgagcgctcgctttttttctctgctcttgctatgtgaggatacagcaagaagaggaccatctgcaaaccaggaagtgggccctaaccagaaactatatctgctggcacctttatcttgcacttcctagcctccagactgaaaaataaatgtttgttgtctatgacactccatctatggtaatttgttatagcagcccaaagtgactaagaca

SEQ ID NO: 3365 - DNA, 197 bp, Homo sapiens
  source 1..197: mol_type = other DNA
tgtccttgtccttcaacttgacttcttgctgatggctcagatcaactgtctttgtgaagcattccacaaactcacaggcagttatttccctgtattttgacagcgctttgtacaaacctctgttatatatcatcacactggagaagatgatgtttgctgccttgctcctagttttggactgtgaattcttttatggc

SEQ ID NO: 3366 - DNA, 212 bp, Homo sapiens
  source 1..212: mol_type = other DNA
caaagatgattaaagggttggaaaaaaagatctatgatggaaaattaaaggaactgggattattgagcctggagaagagaagactgaggggcaaaccattgatggttttcaagtatatgaagggttggcacagagagggtggcgaccagctgttctccatatgcactaagaatagaacaagaggaaactggcttagactagagtataaggga

SEQ ID NO: 3367 - DNA, 309 bp, Homo sapiens
  source 1..309: mol_type = other DNA
ggccgggcacagtggctcatgcctgtaatcccagcactttgggaagcccaggtgggtggatcgtgaggtcaggatattgagatcatcctggccaacatggtgaaaccccatctctactaaaaatacaaaagttagccgggcatggtggtgcgcacctgtagtcccagctactcaggaggctgaggcaggagaatcacttaaacccgggaggtggaggttgcagtgagccgagattgcaccactgccctccagcctgggtgacagagtgagactccatctcaaaaaaaaaaaaaaaaaaaagaaaagaaa

SEQ ID NO: 3368 - DNA, 3886 bp, Homo sapiens
  source 1..3886: mol_type = other DNA
gcccgttttttaaattttttcttctcagttgactggattctgttttcttcatttacttctgctgtctctcctttctctttcaccctctgctgcatgagggacctaaactagtttataatagcctggggttccttaaagaaaatggagaagacaccagactccctttcggggagaaacctgtttctccttatggaacttgaagagtgtaaacagacaagttcatctcagcttttaaactgcttgcttttatattgttacctgatttattgactaaaatagttactgcaacagaggctactcttgggtttttaaagaaaagtgtagtttagacacttaaaaatgtctttgttttaaaaaaattttttttaagtgaaccataaaaacatcacatggtccagcctcataaaaattctccctttttggaaacccaggattcagtgtgggctctgcccagggctcagagatctggttaaaagataggtagtctctaaataaaattggtctccttatgcaatcctatgatagatttttataattttatgttcgatttggcatccatctttaatctccctctagactttttctctctgtatcttatgatgcaaattttgctatttgattttcacctgagttgtttcctttaatatgcaaatttaaggctatttagctgacaactacctaaggttgtgaaacaggttatcaaaatcttgaaaatctaggataggaaaaaaacgttttttatgaatctaagatgtgtttctattggcatgcctaacatgtctatgcatttatatgttgtgtacacaatgtttcactactgaaaatatattaaaaagctctaattaattggcttaaagaaaaaagcacttgaatcaaatagtttatcaggaaaaaataagagactaatcaaatgctttttcaagtttacggaacttaagtgaaatctttaataaataagctagctttaaaattattggtaaagtaatattagaaatgtcttaagaattgccagcatacattcttgtttgcatttattaatcaagcaatttcatacttatccctgccaaatactataaggtgtcaaaatttgacatgggggttataaaactatgaacctagcccaaagctgaatgaactttccttgtgtaacctttaataaacaagacattgatattggtttaataaaaaatagctacatcttgaatttagtaagattaccataacttctaatcttgtggctttgggcagtttagtccacagggactgaggtttgttttgagaaaggactgttactgtctttgtttcaaagctaaactataagctaaggtcccaaatagtttggcctacacccaggaatgaacaaggacagattggaggctaaaagcaagatgaagtcagttagtttaaatctttttcactgtttcagttacaattttgcaatggtggttccaaaactttaaatgatgactatcacagttttcataaataatctacataaacaattaaaataattaggtaaatgtaatgggataaataattgtagacaaacaggtcataatttagaatctaaagttaaattaaataatagatatttcattatttggatattttccaataaaatatatttgtaggaaaacattctttcttaaaaaaaaagtgtgtccttttaaaaaagggtgaacaatttttgtctaattcaaagcttatttaaaggttatgtataaaaccaggtaaaatgaaccaggaaatacaagagatgtagagaaagttataaaaataattttttttttggtaagaaagcttaaagagaaataatttcaaatgaaaaataattttgtatgagattcttcatacgagagagaatttagtcctagagtagaatgactggttgtttaagaaagagggatgttcaggacaaaccagaaagtccaagcatgtcatgaacggtctgtgtaagtcacaatgagaggatttaaaaataaacttttatattatcaagttgtcatattattaagttttggtttgcttaggaaaaaactgagattaaaagtttttttttaaattaaggttattgcatccatgtatctctttgtatgtgcttttaaggtacttgtgacattaagttacaggcctttgacttttgtgtctgaaaaggacaccaagtcctgttaaattttaaacactgacagcaattaaaccccatcttcaggccaggtagaagatgccaatcaaaataaactgcattcctaagacactgggccagaaattaaagctattcaactcctcaaggcccaggaactatcgtggaagaggtgggcgtatgagactgtaggaactgattttgagagataagttcagtttctctacaaattaattatcaatgtcaaagacacactgatgcaagacaagcatatgggtccctgtgtctgattaacaaggttttcttgaagcattaactgactccttaataaaggttataaaggttataaaaggcttatggaagttttatcttatggtcaaaattaaaattttatggtttataaaattttgaaaaacaaatttaattggcttcatgctgtttttattcaggcttattgtttggaaaattaagtctcctttcccaaagaatgaaggttttgcctttttatccttgtgttatcactttggttaaatgaaatgacttattttacaatgacctgtgatcctattttgtgatatcaagtgttttaaacttttgatatttgacaaactttccaaatcaaattataaagtatgcctttttcttacctaattaatcctttaagatattaggttccctaaagtccaaaaatgacatatttggctttggtataaaaattatgcagaaagcattgtcaaatataaaatgatgtttggttttctttgggctgtatttgtataaatatgctattggtatgtgttctaaaattatgggaaacttccataattctgatatgacttaatgtacattatcagtaataattataattatgttaaattattgtatgccacagaggtaacaaatttctttccaattgtgtctttgactatggctgccctaaaacgttttgtcatccacagaaaattgtcttattttggtcctctttagaaggtggttttataatcagctataaaacccttacaggtgctcctgaatgcaggtttctgataactgtggagactgtgacatcagaatagaggaaaaactttcaggactcatggagagctgaaatgttcatgaatattaagcagaacaggaattaactgcatggactaaactaacagaagtctaaagtaatctttttaactttttttgtttaaaacctgctcatcctttgtttttcagagtcaggaaaacttttaagctatttacagcttttaacaattgagtaaagtatactcctgtgaacaaaatgtggagcatatttgttttctctctacctgctttctcaagaatttggaaactattggcaactatttgtattcttaacttacagcaatacagttatttgcgtaagtgcaataagaatctgttttcatttataacaggacacaactggagaaactggttattttaccaaggcttaggctggaatggtgtgctttcctttaaagaatcaaacttgacttatggagccaataaaagcctcttgggaaaactggcctcatacatgtctacacagtccctgtatagggttcctgacctgtggtaagtaaagaatgtcactttctgacaggcctaggagctccaagctttatcttagaacctcaagaggagagaatcacccaattcacaggtatttgatgatacaaatccacggctgggctggttttaaaaaagtcttatctgaggagattccttctattg

SEQ ID NO: 3369 - DNA, 613 bp, Homo sapiens
  source 1..613: mol_type = other DNA
tgacacaggagatagaagttatttaggcagatagtgagggtaagagttcttggcaaggcttcccttctaacagaaagcagcccgagaaacttcttttgtctaatgaagagcagcctgaaaaattgagctgcagacatagataagcaagctggaagcttgcacaggttactgccagcagctgtgccaatacaaaatggctacctgggggccaggtatgttcaacgtgtaggctccatcttcctttttgtcaccatgtgtaaagaaacaggcaacatggtgtgggccaggaagataatccatttgcataataaaacattagggtgggggtggccagctttttgcacccttatgcaaatggcacacctggtccaaccaatctttcatgccctatgtaaatcaaacaccacctcctcaagctcatctataaaacctgcatttcactgaggaagcagaaacccatttgggacccctctctctgcaggagaaagttcttcttttccttttgcctattaatcctctgcttttaacctcactccttgtgtgtccatgtccttgatttcctctgcatgagacaatgaacctcaggtatcaccccagacaacaaggctgcttc

SEQ ID NO: 3370 - DNA, 297 bp, Homo sapiens
  source 1..297: mol_type = other DNA
gccaggcgtggttactcacacctgtaatcccagcactttgggagtccaaggtgggcggatcacctgaggtcgggagttcgagaccagcctgaccaacatggagaagccccgtctctactaaaaatgcaaaaaaaaatttagctaggcatggcggcgcatgcctgcaatcccagctacttggaaggctgaggcaggagaatcacttgaacccaggaggtggaggctgcggtgagccgagattgcgccattgcactccagcctgggcaacgagtgaaactccgtctcaaaaaaaagaaa

SEQ ID NO: 3371 - DNA, 285 bp, Homo sapiens
  source 1..285: mol_type = other DNA
gctgggcgcaatggctcacgcctgtaatcccagcacttgggaggtcaagcaggtggatcacttgagctcaggagttcgagaccagcctggccatgtctctaataaaaatacaaaaattagctgggtgtggtggcatgcacctgtaatcccagctactcaggaggctgaggcatgaggcttgaacccgggatgaggctgcactgagccaagttcgtgccactgcactccagcctggtgacagagtgagactgtcaaaaaaaaaaaaaaaaaaaaaagaaaagaaaa

SEQ ID NO: 3372 - DNA, 187 bp, Homo sapiens
  source 1..187: mol_type = other DNA
ccagatagtccttgttttaatgatgggttctctcaccactgtcttgatgctctgagcaagttacctcttccctctgaccctcagtttccatatttgtaaaatgagaataaacataccaacttaataaagatattgtgaggattaatgggtacagagtgactagaatgatatttgatagaaattaaat

SEQ ID NO: 3373 - DNA, 440 bp, Homo sapiens
  source 1..440: mol_type = other DNA
ccccagctcctgctactccccagcttgaacttgagcatacatggatgctcagcttcttttgatttgctaaaaacatcacacttgctcacatgcctgtttatgctgttcatgttgtttatgtttcttacctagaataaatagtctcttcccctacttcttttcccgacttcttactttttcctaagattcagtgtacagcatcatgctccacagcaaaccttcctaggccctattctgggcttgccttccctctcaaaacctacataatagattgtatttacctctcctgtcaaccacattgttttgaaaatatatttctatttgtgtctcctctactgcagtataatgtctccatgggcaagaactgtgtattcatcattgcattcctaaacccaaaccaaggccaggaatggagatatcattgataaatagttgttgaa

SEQ ID NO: 3374 - DNA, 1219 bp, Homo sapiens
  source 1..1219: mol_type = other DNA
ccacccttttgtatcttctttgcgggttcttcctcatctcccagacatttaaacgtaggagtacaagggcttggtccttgggcatcatgcattctctgcttatacttgcttcttaagaatctcatccagtatcatggctttaaattattccatctataagctaatgatatccaaatttacaactgctactcagacctctacccaaactccagacttgcgcattctgttgcctactcactatctctacttgcatgtctaattggcatctcaaatttaagatatctaaaacagttctcctcatctctctaaggtcaaagttactcctcttagtggcaactccgtctttttcaggctcacagtccaaaaaccttagagtaattattgactcattgcgcccttctcttacttaccatatttgactcatcagcaactcctattagattcaaaatacattcagaaactgaatatatttcactccgctccagccatactgccttactcatagcctggtgcatgctaggcatatctcaacttcaagacatttgcacttcttgaatctaatatattcagaacttgaatctgtcagaacttgaatatatcttgaatctccacagcacccccttggccaaaaccattatcatcgcttgctggatcactgtaaaagtgtcccaactagttttcctctttctaccctcaccttcatatagtcttctctcaacacagtagccagagagttcctatcaaattccaagagcatgccactcctctgctcaaaacactccattgccacattgcctactgctctccttctgacccactcagccccagccacactgcctacctcacagcctgggacatgctaggcatattgcagctcaaggtatttgcacttcctctttccttggccctgagtgttcctctcccagaaacctgcatggtctccccagctctcctctcagagcttggctcacagaggccttccctgcccaccaatctaaaagttgatctgctttcttcaccaacttttcttaattccttccttggctttttttttttttcttttttgacaccactattaaactaccatgaattaatttatctggttaattttctatattaccaactatgacgtaagctccattagtgcagggacttttttctcttttgatcactattatccccagtgtctagagcacataacagatgttcaataaatact

SEQ ID NO: 3375 - DNA, 550 bp, Homo sapiens
  source 1..550: mol_type = other DNA
gaagggtaacaaaatatgtcactccaaagtatgccacttgtaaaaattattttttgctgaaggcaattgtgaagaagcagatacagataaagctctttgctttccctctgtctgcctaaaagcatgacataaatttgtagagttttctctcctgccctctctccagggaaggcagaagttagtgacaacctagagcctgagcctggagactgcaccagaggaatccgcataagaaactttactacaaccagccattatctgccattaattatcctcatctatttaccttcatacaatttgctgttcctatagactcaaagtcctcttcctttgttttgtctcttctctaagaatttattgttcttttaagatgatatataagctgaagttctaaccacccttttgagttactcatctctgagtgcttccatgtgaacgtattatacacagtttaataaacgtctgtttgtttgttttttccttaatctttctcctgtcagtctaatttgcggggtcccagccgataaacctaaaacgggtagagggaaaa

SEQ ID NO: 3376 - DNA, 294 bp, Homo sapiens
  source 1..294: mol_type = other DNA
caagtatatcaaactattgctgttctccaaaccttccagatagttttctgactctgtgatgttaatcatgctattccttttatctgaaatttacttcatctttttctacccagaaaacgcctatttattcttcaaagcccatatcagccttcacaactcttttatgcattgttgtaaaattgtattttctctcatctgtgtttccgtagcacttaataagtaactccggttttggtgcttctttcattgtatggtggtgtttatttgcccttaagtgtcatgtgctcttcattg

SEQ ID NO: 3377 - DNA, 288 bp, Homo sapiens
  source 1..288: mol_type = other DNA
gccaggcacggtggctcacgcctgtaatcccagcactttgggaggccaggatcgagaccatcctggctaacatggtgaaaccctatctctactacaaatacaaaaaaaaaaaaaaaattagccgggcgtggaggcaggcgcctgtagtcctagctactctggaggctgaggcaggagaatgtagtgaacccaggaggcggagcttgcggtgagctgagatcaccccactgcacttcagcctgggggacaaagtgagactccatctcaaaaaaaaaaaaaaaaagaaaa

SEQ ID NO: 3378 - DNA, 462 bp, Homo sapiens
  source 1..462: mol_type = other DNA
gaacaagttcaggatgccatcccaaaatacaccatttgacatgttgatcattttgagctaaaggcacctgaaaaacagcaggtgcaagagatgcactctgattttcccttttcttcataaagcaggagttgaaactcccataccttccctataccaggagaagagaaatagtctcatcacaagaggaggggagttaaggctgaaagaaatctgtacaaacagaccttcttaaactaacccctctcttcctagtcacttttctacaattgccactctttgttccacatagtatgtaagcatttagagctagtcatttctttgggtctccatttttcttgtgagagcattttgtttacaggcacatgtaaataaaatgtgtatgtttttctcctgttgatctgtcttatatcagtaccagctggagaccacagggggttagagaaaaattttaccttccctaca

SEQ ID NO: 3379 - DNA, 297 bp, Homo sapiens
  source 1..297: mol_type = other DNA
ggccggatgcagtgactcatgcctgtaatcccagcactttgggtggccaaggcgggcagatcacttgaggccatgagttcgaggccagcctggccaacatgatgaaaccccgtatctactaaaaataaaaaatcagccaggcatggtggcacacgcctgtattcccagctagttaggaggctaaggcatgagcatcgcttgaaactgggaggtggaggttgtagtgagccgagatcgtgccactgcattccagcctgggtgacagagtaagactctgtctcaaaaaaaaaaaaaaaa

SEQ ID NO: 3380 - DNA, 116 bp, Homo sapiens
  source 1..116: mol_type = other DNA
gcgctcggctcaggcgaagcctcttctgccgtccccaggcctccgtctcctcctccggcgcctcctcccgccgctccctccgcctgccagcaccccctccctggcgaagccccctc

SEQ ID NO: 3381 - DNA, 443 bp, Homo sapiens
  source 1..443: mol_type = other DNA
catgaggaatggtagaagtggtcttttgtttaaattagttgcattcagcatatatgaattgtcttaaatattttggggatactcccccgccttttaaacagggcataagatctggtaaactctctgtatatcttcctacctttcaaaatcgttcttagggttagtcaagtctggaatataattgctgactataaagttagcaattatgcttttaaggtgttgtcacatcaacctaaagagaaccatctatggaaggtatggttgaaacatctgtaggaacacagaactgggatttcactgagtttaccaaatcaactgtgtgaactgtttctgcactgcttgctaatggtttcatctaataaatgtttacttatatagctgagtttggttttattctaacaaattacctggtggtgtgattgtgaggtgattaacagttctca

SEQ ID NO: 3382 - DNA, 75 bp, Homo sapiens
  source 1..75: mol_type = other DNA
caagaatttatattctagggttgatcagctagtatttaatcaaaaaggccacactcccatagcagctactctaag

SEQ ID NO: 3383 - DNA, 96 bp, Homo sapiens
  source 1..96: mol_type = other DNA
gaatgtaagctccatgaaggcaagaatgcctttttgttttgttcactgctgtgtctaaaataatgcctggctcaaatatttgttgaatgagtaaat

SEQ ID NO: 3384 - DNA, 77 bp, Homo sapiens
  source 1..77: mol_type = other DNA
accattacataactgaagactcccaccttcaggcaggattgggtagtacgtgtttgtaactacctggcattgccttt

SEQ ID NO: 3385 - DNA, 682 bp, Homo sapiens
  source 1..682: mol_type = other DNA
gaaactgcctttgcaaaagttatatctgagaaaattatgacactgccagagatatgacctagcccactcccctcctcttgcctttagctttcaagctgccttaatcatttctgggcttaggcccagataactttgggagatagtttaaaggataataagccttccccaaaactcaactgcctttataaagctaatgaaaggccctcaggcttcaggggaggacaggaatctgagttgtgctaaggtgtagacgtattaatagattgccactagtgcaccaatagtggtgcagataacaccactattgtagattggccttttgagatatcttttcaggttttttgcatgtctgacacccatggctccagctggacctgctaaaccactcctgtggccccacccaggaatggttccactcaagaggacaactttgaccccctattatttcatcttcagcccaatgaattatcagtaagcacccattgcatagcaatcctcaccctttcccccaaactgctgttgaaaaactcctatcccatgagctgtggatgagattggtttgagtactaactctatctcccatgtggctttgccggccttgtgtttattaaactctttctttactgcaatgctgtggtctttccttgtgcagcaggctggaagaactcctcaggcggttata

SEQ ID NO: 3386 - DNA, 458 bp, Homo sapiens
  source 1..458: mol_type = other DNA
cttcctgcactagctcgtactgaccactccatccaggctcttcttgctctacatcctatacttctcccataaatgttggtgcttccttggattatgtcctttgccctttaatctgcgctggctacacacttttgagaagatcgcagccactttacatctccctgtagggattaggcacagcctgcactcccaaggcagccactgttagctctgattattacctctttatttctaatagattccttttttgaactctggattcatatagctgactgctttctggacatctctgtctgaattttccacaggcattgcaatttcactgtgtctgaagggaacatatatcattgtcttctcttgccaactttcccctcctgctgctccaaccacctccaagttatccaagacagaaaaacctgggacctatttctgaactatttgctttattctttcctccc

SEQ ID NO: 3387 - DNA, 622 bp, Homo sapiens
  source 1..622: mol_type = other DNA
gagagagggagagggagagagggagagggagagaaggagagggagagagagaaagaaaatgggaaagaaaagagagagagagaaagaaagaaagagagaagaaagtcaataccaaaaggaactctaaaaagccacacaagtacatgggaaccaaacaacttgttcctgaatgatctttggacaaacaatgaaattaaagcagaaatcaaaaaaattttcaaaacgaatgcaaatagagacacaacataccaactctctggaatacagcaaaagcagtactaagacacagtttatagtgtgaaatgcctacatcttgacagaaagatctcaaataaaatttaatgttgaacctcaaggaacctgaaaaacaagaacaaacaaaacccaaagctagcagaagaaaataaatggcaaatatcagagcagaactaaatgagactgagaccaaaaaaatgatacaaaggatcaacaaaacaaaagctggttctttgaaaggatatgcaaaactgacagatggttagctagactaagaaaaaaagagagaagattcaaattagtatagtcagaaacgataaaggtgacattacaactgacaccacagaaacagaaaagatcaccagag

SEQ ID NO: 3388 - DNA, 446 bp, Homo sapiens
  source 1..446: mol_type = other DNA
aatacactaaaataaaattgcttaaaactagtgataaagaaaaattctcaaagcagccaatgacaaaaacacggtttgcacagaggaacaaaaaatgtcagcaaacattttattggaaacaaagaaaattagaagatgatgaagcaacatctttaaagtattggaagataaacattgtcagctggaaattgtagactcagagaaactatctttcaagatgtaggtgaaataaagattttgttcaggcacttagaacctgaaagaaatcatcaccagtaaaacaacactataaaaaatgttaaagaaaatgtttcaggcagaagtaaaataatatcaaaaggaaatttggatctacatagaagaatgaaaagcactggaaatggtatcaacatggttaaatatataagatccttttatttctgtttgaattcaattgattgtttaaa

SEQ ID NO: 3389 - DNA, 3866 bp, Homo sapiens
  source 1..3866: mol_type = other DNA
tgagtgaatagagacatctggcacttggtgatcggaagtccagaagggtggtgtggagacacccagcctctgcagctccatctcccctgtccagatcagattggtccagagacaggagagacttccccttgtggggaaaaggtaagcagaagcttcctactagtccccattgccaccacaaacatctacattccttactgcaggagaatcccacagttcttgcaagtcctgactctagtttggagagatcctaggaattcacacagctgccttgctccggattactagcacaagatgtgcattcctcactccccacccacgccttgtgagtcaagctgctgcagcatggtgccatcttgagacgagagccacctctggagtgtgcactcttctgggggtcagtagcatttggacctctccagcactgggattccatcttcattccaccaagcccaaatgtgtggctgaacaccacagcctcagctgctcagagcctgggcccatgatcggctgtgactctggtcctgcacagcaggggaaccagtccccactgcccacactcaagtaagaggaaaagtctggcagtcctccccagggcaaacctgcccttgagccagccaaactgctgtgtaccttcccctgagcaggagagatccttgaaccactgagtggcttacataccctcaggctggtagagtggctatgtgtctgtgcccaggtccggagaaacagcccactgggtgacttctggcagacacagccccaggctgaccgagcatctgtgtgtctgcatcccctgcctgagaaacagctccataggctgcccctggcaaatacatccccaggctgacctagcaactgtgcatccttgtcttaggtctgagaaacagccccatgggctgcccctaccaaatatcctcctaggctagccatcaatattctgggtctgagaaacaaccctgcaagccacctctggcagaaatgcccctaggccagctgagcagctgtgtgcacctgtcccaggcctgagaaatagccctgtgggctacctccagcagacacacacccaggccagctgagaagctgtgtagccatgtactggaccttagaaacagtccttggcaggtactcccccaggctggactagcagctgtgcacttatgcccccagccagaataacagactgcaaaccagaccctaagttggccaacttaccatgtgcatgtatgcaccctgacctgagaaacagcccagcaagcccacccatggcaaagttgcaccatcgctgccacatactctctcagccttggccaccgagctactcataaatgtcatgaatgtggattacaactgaagaaactgcatagagaaacactactgtgtccaactagaaacaaacccaatgcaccttcactaaactgacacccagggcccatctatatgagtaagtctcttcttatcctactccataaaattagaagaggtgactcttctaccagatgcatagaaatcaacatacggacacatcaaacatgaaaaagcaaggaaacgacacctttaaaggaatataataatacttcagtaatagactttaatcataaggaaatatacaaaatgccagaagtggaattcagaataataaggaaagtcagtgagatacaagagaatataggtagaaaattcaacaaaatcaggaaaataattcatgatatgaatgaggaatttaacagagagatggatataacccataaccaatcagaaatcttagagctgaagaatttaattaatgaaataaaaaatactatcaggagctgcaacaacagatttagaccatgcagaaaaaagaattctgcaacttgaagacaagccttttgaaatagcacagacaaaaataaataactaaaaaaagaaaaaaaatgaagaaaatgtataggattattgtggcaaaaaatataggattattaagtgaacaaatacttatattatggaagttccagaaggaaaagagaagagacaagttgtaggaaacttatttattgaactaatagccaaaaacttcttaattttgaaaggcagatgaacattcacatcgaggaagctcaaagaacctgaagtagatttaacccaaagaggtcctcttcaaggcacattatagccaaattgtcaaaagtcaaagagaattctaaaaacagcaaagagtagtgtcaagtcacatataagggaattgctagtggactaactgtggatttttcagcagaaaccttacaggccaggatagaatggaattacctattgaaagttctgaaagaaaaaaaaaacccgtcagccaagaatattagaatattaaacccagcaaagctatcctttttagacaagcaagaactgagagaattcattgtcaccagactggccttagaaaaaatgttcaaggtactcttacatctggaagttcaaagacagtaaccaccatcatgagaacacgtgaaactaaaacttgctgctagagccaatacacaaaggaaaaagagaaagaaagaaatctttcccaacagaaaaccattcaactataagaataagcaataaggaagtaaggaacaaagggtatacagaacaaccagaaagcagtcaataaaatgacaggtataagtcttcacctgtcaataataattttgaatttaaactaattacatttcttatttaaaagatagacttatttaatatattaagacaaataaacaaaacaagacccaaccatatgctgcctaccagaaacttaaagacacacatagactgaaagtgaaaggatggaaaaagatattctatacaaacagaaaccaaaagcaatcaggagtagctatacataaatcagacaaaacagacttcaagtcaaaatctgtacaaagagacaaaggaggacatcatataataataaaaggatgaattcagcaagagaacataacaattgtaaatatatacatatctgatatcaacactcaaatatttaaagcaaatattattaaatctaaaggtagagatagactctaatacagtaatagttgttgacttcagcaccctactctcagcattggacagacaacctaaacagaaaatcaacaaataaacattggatttaaactgcatgatagaccaaactgcacctaacagacgtttacagaacatttcacctgcccaacaactacataataaaccttctttccatcagcaccaggaaatttctcaaggattgacccatgtgttaggatacaaaataagtgtcaaaaaaatttaaaaaaattgaaatcatatcaagtatcttatctgactatatggaataaaactagaaaccaacagtagatgaacattcaaaactatacaaataaatggaaattgaacaatattctaaatgaccagtgggtgagggaataaattaaaaaggaaatttaaaaatttcttgaaagaaatgaaagtaggaacacaatatacaaaaagttatgggacacagcaaaagcaatactaagaggcaagtatgtatcaataaatgcctgcatcaaaaagctggaaggatttcaaataaactgcaatgaatctcaaggaaatagaatgcaaggacaaaccaaacccaaaatcagtagaaggaaagaaataataaagatcagagcagaaataaatgaaactgatactaaaaaaacaaacaaaaatttcaacaaaacaaaaagttgttttttaaagatataatcaacaaaccattagatacactaagataaaagggaagactcaaataaataaaatcagaaatgaaaaagaagatgtcacaatagataccataggaccaaaaaggatcattagagactccagtgaacaactat

SEQ ID NO: 3390 - DNA, 215 bp, Homo sapiens
  source 1..215: mol_type = other DNA
aggagcgtagctctggaatcagtattccccgggtgagaattggggctctgccacttagtcgtcgggtcattggagggcaaattgctaatcagtttaagcttcatctgtaagatgggtattgaaaagggccgccgcaaagggagaaatgtgaaaatacatattaaatgtgaaaatacacataaaacctttagagcacagtgtccactcagtacact

SEQ ID NO: 3391 - DNA, 309 bp, Homo sapiens
  source 1..309: mol_type = other DNA
ggtccggcacggtggctcatgcctgtaatcccagcactttgggaggctgaggcgggcgaatcacctgaggtcaggagttcgagatcagcctggccaacatggtgaaaccctgtctcaactaaaaatataaaaattagccgggcgtggtggcaggcgcctgtaatcccagctactcgggaggctgaggcaggagaatcacttgaacccaaggggcagaagctgcagttagccaagatcgcatcattgcactccagcctaggggacaagagcgcgagacttcatctcaaaaaaaaaaaaaaaaaaaaaaaa

SEQ ID NO: 3392 - DNA, 707 bp, Homo sapiens
  source 1..707: mol_type = other DNA
attctaaaatatatacagaaccataaaagccccaaatagccaaagcaaccctgagcaaaaagaacaaggctggaagcatcacactaccagacttcaaaatttactacaaagctctaatacctaaaataacatggtactggcattaaaaaaaaaaaaaaaataggcacatagaccaccaatgaaacagtatagagaatctagatataccaactcatctttaacaaaggtgccaagaacatacaatgaggaaacgatggtcttttcaataaatggtgtgggggaaagctagataactatatgcagaagaatgaaacaagattcctctctctcgctatacacaaaaatcaaatcaaaatggattaaaggcttaaatctaagacctgaaactacaaaactagaagaacacactggagaagtgctccaggaccttggtctgggaaaagatttttttgtttaagacctcaaaagcacagacaacaaagcaaaaacagacaaatgagattacattaagctaaaaagtttctgcacagcaaaggaaacactcaacagagtgggggagacaacccacagaatgagagaaaacattttcaaactatccatccgacaagggattaatgaccagaataaagagaccaaacaatttaagccaaaaacaaaacaaacaaacacacaaaaaaaacaaaagccaaataatctaaaaagtgggc

SEQ ID NO: 3393 - DNA, 307 bp, Homo sapiens
  source 1..307: mol_type = other DNA
ggctgggtgcagtgactcacacctgtaatcccagcactttgggaagctgaggcgggtggatcatgaggtcaagagatcgagaccatcctggccaacatggtgaaaccccatctatactaaaaatacaaaaatcagctgggtgtggtagtgcacgcctgtaatcccagctactcgggaggctgaggcaggagaatcacttgaacctgggaggcggaggttgcagtgagccgagatgacgccactgcactccagcctggagacagagcgagactccatctcaaaaaaaaaaaaaaaaaaaaagaaagaa

SEQ ID NO: 3394 - DNA, 206 bp, Homo sapiens
  source 1..206: mol_type = other DNA
tgctgtggtctgaatgtttgtgtccctccaaaattcgtatgttaaaatctaatccccagtgtgttggcattaagaggtggggcctttgtcaggtgactagtgagtgggattagaggctgaagggggcacccctgctctttctgccaagtgaggacacacagaaagctccatctaaaggaacaggccctcaccagacaccaaatctg

SEQ ID NO: 3395 - DNA, 118 bp, Homo sapiens
  source 1..118: mol_type = other DNA
ccttgagacctgtattctggtgagccctgtctggttctgctctgacagtgtgacttcccatgatgcaaagaatccacagagccaagatgtgctcacacataccctgcctttagattac

SEQ ID NO: 3396 - DNA, 292 bp, Homo sapiens
  source 1..292: mol_type = other DNA
ggccaggcgcagtggctcacgcctgtaattccagcactttgggaggccgaggtcggcggatcacgaggtcagatcaagaccatcctggctaacatggtgagaccctgtctctactgaaaaaaaaaaaattagctgggcatggtggcaggtgcctgtagtcccagctacttgggaggctgaggcaggagaatggcatgaacttgggaggcagagcttgcagtgacccgagattgcgccactgcactccagcctgggtgacagagcaagactctgtctgtctcaaaaaaaaaaa

SEQ ID NO: 3397 - DNA, 1922 bp, Homo sapiens
  source 1..1922: mol_type = other DNA
atgtaaaaaccccaaagatacacacacaaaaaaaatctgtttgttagaactcaagtgaattcagtaaagttgcagaatacaaaatcaacatacaaaaagcattagcatttttatacataaataatgaaaataatgacctaactgaaaaattaagatgccatttatgatagcataaaaaaaatacttacttaggaataaatttaacaccaaggcagtaaaagatctgtatgtacactgaaaactatgaaacactgatgaaagaaagacacaaataaatggaaaggtatcccgtgctcatggatcagaataatactgttaaaatggtcacactacccaaagcaattcagaatcaatgcaatcctatcaaaattccaatggcattatttacacaaacagaaaaaaatcctaaaattcatatgtaacgataaaagaccctgaataggcaaaagaatactgaggaaaaaatgttggagacatcacatttcctaattataaattatactacaaaactatagtaatcaagacagtatggtactggtataaaaacacatacacaggccagtgggacagaagaaagagtccagatataaatccaaacatacacagtcaactaatttttgacaaagacaccaagaagacacatcggggaaagaacagtcttcattaagtgttcttaatgaagatgctgggaaaactgcacttccacatgcaaaacaatgaaatcagacccttatcttagacctacacaacaatcaattcaaaatggataaaagacctaaatgtaagaccagaaactatagaagagaacataggagaaaagttcctggacactgacccttggcaatgattttttggatatcacaccaaaagctcagtcaacaaaaacaaaaacaaatgtgactacatcaaaccaaaaagcttctgacagtaaaagaaacagtcaacaaaatgaaacagtagcctacagattgagtaaaaaatatttgtaaggcatatatatggaaaagggttagtatccaaaatttataaagaattcatacaactcaattttaaaaatgggcaagacctgaaaagacatttctccgaagacgacacacagatggccaacaggtatataaaagggtgctcaacataattaatcatcaaggaaatgcatataaaaaccactcgaagtactacctctcaccagttaggctagctgttatcaaaaaaaacaaaagacaacaaatgttgtgatggtgtggaataaaaggaactctgtgcactgttggtgggaatgtagattggtacagccattatggaaaacagaatggaagtttctaaagaaaaataaaactaccatacgatccagcaatccctcttctgggcatatactcaaagtaaatgaaatcaccaccttgtaaatatatctgcagtccgtgttcattgcagcattattcatagtagccaacatggagacaactgaagtgtccgttgacagatgaataaagaaactgtgtatatatatgcctacacacaatggaatattattcatccctaaaaaaaaaaaaccaacgatatcttgccatttgctacaacatggatgggcctgaaggacactgtgctaaatgaaataagccagacagaaaaaaagatactgcataatttcacatatatgtggaatctaaaaaaaaaatttaaatatataaagagcaaaactggttatagggggatagggagaaatggggaatgtaggtcaaaggattcaaggtagcagatatgtaggatgaataagtctagagatctattgtacaacatgaggattttaggtaacaaatttgtactgtatttgggattcatggtaaatgagtagatgtcagctgctgttgtcaaaaaacaaaaaatatgtgggtaactgagatgatggatatgttaatttgctt

SEQ ID NO: 3398 - DNA, 3465 bp, Homo sapiens
  source 1..3465: mol_type = other DNA
tttttccaagatggtggattgtttgcatgcctctaccacgtgaaaagacaaaatagtgtgtggtgattcatgctgtgaacttttttccaagaagcaacagaggaacttaacatgaaaactgaaagaaaccacagaccctctgaaaaaagcagtgggctgcagcctacactatgagccaggtggaaaactataagcacctacccagtgctggagctggtttagtgagcagtggggaatatatgagaagcagtggcatcaggacgggctttatatgcattcccagactccagcggggatggagggaagccatttctgatcccacctcacaggggaccttgcagaagtcggccagctaactcagacagcaatcacaggttgagagaagctcctaactgagatctgcgatataatcttaagggggggatgaacccctttggccagaaccaaggggtgagtgggaagtgtgctgcagccatgagcacaggagctgggcacccctgcttcatgggcagaccaagaagggcatagcctgaaagccctggtttccttctcctcaaggaaggcttatggcctgaggcatttttgagttctgagcacagattgcctggaacctagctagctgctgctagtggaacactgcctacgagagacctgccttgccaagtgcgtgggagctggtgggaattactgccgtctgctattccccactccccaggcagattcttctacacagcagatgcagctgcactcctccctggaccattaccccagtagccagagaactgacccctgatccccactggggccactgcttgcacctgcacatgaaaaaccagagtgcagtcctgccttatccagcccccacctggcattgtccctccacccaccctggtagcttaacacaaagaacagaaacttttggaagccttatggcactgcccatcgcctaagacaccagagtatctcccctggataacatatggcaaacacaaatcccaccaccaccaccacagctggcactcttttgcactctgggagtcaaccaacatagccaatacattacagcatctccaggtagaagaacacagcacccaggaagggaaaaatgtatgtgtaacctcacctatcaccatggccttcatcaccctggctaaccaagaggccctgactctgtccacataaccagttcattactactacaatctggcatttgagaaagccaacacactaaggctatttataaccaaggaatcttagagtctatgtcactcccctgccacctctatcagcgctggtgctggtacctgctgctgcgacacttgaggaccagtcacatcactggatcccttgaagacattccctagcaccagcctggagtacccactgggtagctagacctagaggagcagcagcattcctagtggtctgatcctcagggactcctacttctaggggaaggacacatcacatgggacaaaagaatccaaacacaggccttgagtccctgaactttccgcttgtgggaagtttcagcagaggcataggcgcagtgccgggctcagcagggaaagtctgcacctctaccccaacagccaggaagccctggtgcttgtgaaggatcttggagaagggagtgcttcttctccccctcacctactgctgaagacacagcaggggcttctcccatgggagctcagcatggatacatacacctgtagacagcccttctagaacccttcagggtgactgcatccccacaggaggagtgccctccaggttcaggcttgcacgaggtataaagtcacagttcctctctacatagaacagcaacatgcctgcagatgaaaagaggtgcctgtctgatctgaatagctgaacactgggtcaggaatgtaactgggaggtggatcactttcctgctggtgtggcagggaagcagagttggctccctcccttccctttgaaaagatttcagcagtttcactgagagctcccctggctacctccatcaaagctgggacctctgttcaccactggatattacatttacccacctgctttagccatgaccggtttttaaccatggatacttcccctactggcctgaagtctgaactgttcaactgagtaaacaaaatactgcggaaaataaattaattaaaaacggtacaccactagggaatgagataagcttcaagagacctctgccatttcaatcctacagcaatcaacctggtcacacaccaagcacattgctaatacaaccatctgagaaagccatcatacaaagactctctataaccaaataactcatacagtgtcttcatccctgaaagaaccaagagccaagtcaggctacaataaacattaaagtcacattctcaagggaaaaaaaaaccccacaaaaataaacaactgaaacaaaaataaattcaagaaaaattagtctaacccaatgaaaaggaaccagaaaaataattccggcaacaaaacagggttctataacaccttcaaaagatcacactagctcttcagcaatggatccaaaataagataaaatatttgaaatactagataaagaattcaaaaggttattagctacacaaggagatacaagagaaaggcaaaaaccaacaaaaagaaattttaaaaaccacttatgatatgaatgacaaattttgtaaagagatagctattttaaagaaagccaatcagaacttctggaaatgaaaaacacatttagggaattacaaaatgcagtggaaacttttaacagactaaagtagaataatttcagaattcaaaaacaaggctttcaaatgaatccaacaaggaaaaagtaattaaaagaaatgaacaaagcctccagaaaatacaggattatataaaatggccaaacttaagaaccattggtataccagagggagaagagaaagcaaaaaggttggaaaacttatttgaaagaataattaaggaaaacttccctggccttgctagagatttagatatctaaatacaagaagctcaaagaactcctgggggattcatcacaaaaaggacatcaccaaggcatacagtcatcatgctatctaaagtcaacacaaaggaatgaattctaagagcagtgagacaaaagcatcacgtaacctataaaggacaacctatcagactaatggaagacttctcagcagaaaccttataagccaaaagggagtggggtcttatttttagcctccctaaacagaataactgtcagccaagaattttgaatccagcaaaactgtcataaacgaaggcaaaataaagtctttttcagagaagcaaatgctaaggaaatgttactaccagaccagcctgctaaaagaagttctaaatcttgaaacaaagggtcaacacaccccataatagaacctcttgacagcataaaactcacagggcctataaaaaaataccacgatgaagaaa

SEQ ID NO: 3399 - DNA, 1182 bp, Homo sapiens
  source 1..1182: mol_type = other DNA
ggaactaaaatgtgtcactacaaaaaaaatcaactaaaaacaaaggaagacagtaaggaggaaatgagagacaaaactctaaggcagagagaaaattaaatagaaaagtggcaaaagtcagtctttccttatcagtcattaaagagattaaattctccagccaaaaggaagagattggcagaatggataaaaaacatgatccaactatatgctgtctacaggagacccacttgagatctaaagacaaacatcttgaaagtgaaaggatggaaaagatattccgtgtaagtactagcaaagagagctgaggtggcttacactaatatcagacaaaatagtctttcagtcaaaaactgttacaagagacaaaggacactacactgagaaaagggtaaattcacagaaatataacaattatatatgcatttatcatcagacccccaagatacaaagagcaaatattaacagaattgaagggagaaatggttctacagtaatagttttagacgtcaataccccactttcaataatgggtggaacaaccaggtggaagataaggaaacaggacacttgaacaatacgataagccaactggacctgacacacgtatatagaacaccttcccaacaacaatagaatatacatttttttgcagtgcgcatggaatagtctccaagataaaccatatgttaggccacaagtgttaatgacttagtaaagattaaaatcacaaagtagcttttctgatcataatagaatgaaactaggtaccaataactgaaggtaaactagaaaattcacaaatatgtggaaagtaaataaatgatgagtcaaaaaaaacaaacaacaacataagagacatcagaaaatactgagacaaatgaaaaggaaatacaacaagccaaaacttatgaaatgcagcaaaagcaatgctaaaatggaaatttttagctgtaaacacatagatttaaaaatatctcaaatcaataacctaactttacctcttaaggaactagaaaacagacaaaaccccaggctaggcagaaggaagaaaataataaagaacagagtagagagaaataaagcagaaaatagtaaaatgattgataggaaaaaacccaaaaattggttctttgaaaaaataacaaaattgacaaacctctagctagactaagatgactt

SEQ ID NO: 3400 - DNA, 357 bp, Homo sapiens
  source 1..357: mol_type = other DNA
ccattattcgacagtagcagaacattctttgtcccagaacacaccgcacactttcttgtgcctggtttcatcactttatgcctcatctcttttccttctttgtcttccttcacttcaaggtaatctccaatgccacttactctatgaagtcttccacaatccttcctgagaaaaataaatggtcttatcccttctgttcccccagcatttcacctgcacctctgttacagaatttctatactaagctaccaaactggaagtcttagaggatagacacatcttacttgtctatttcctgaacagtatctagtgcagaactttgtagaacatacactcaaaaactgtttttggaataaa

SEQ ID NO: 3401 - DNA, 106 bp, Homo sapiens
  source 1..106: mol_type = other DNA
gctcattaatgtaaatgaatattcatctagaaaaatacatgaaaatattttaaaaacccatttacctacctctggcccaatgaacagggtaaagatgtttccaaag

SEQ ID NO: 3402 - DNA, 2642 bp, Homo sapiens
  source 1..2642: mol_type = other DNA
agtatttttcatggtatatgtgagacccattagtgaggcatgaaatcaattctgtgagtcacaatgaacatttgtctaaaaaacaaaataaaatgtaaaataccaaagtgttttgcatgaatcctttgcctgaattgtgcacattgcaaggaatgctgaggtcaatttcaatatgcgagaggggtatttgatggaggagatatgatgaatagaatgtatattggctaagaaatggttttcagtcattgattcctgggtgtcttgcttgattttcataatagcacggttaatgttctatagtcaagttttatattacaattacttgcaactagttgtgaagtctgaaatattcgattcaattgcaaactttgagtgtagtttttgaaaagatgttatttagactgtatatttttttcttcttttttgagttagtgccaattataacattttaatcaaactggaacaaattgctattaaaatggatcatttctttattaaaagaaagaggaatagtgaagtgaaatatacagaagcatgttcaagttcatctgttgaatctggaattgtgaatagtgacaatattgagaaaaatactgactccaatctgcaaacttcaacttcatttgagccacatttcaaaaagaaaaaagtaagtgcaagacgttataatgaagattacttaaaatatggctttatcaaatgtgaaaaaccctttgaaaatgacagacctcagtgtgttatttgtaataatattcttgcgaatgaaagcttaaaaccttcgaaattaaaaaggcacttagaaactcagcatgctgaacttattgataagcctcttgaatattttcaaagaaagaaaaaagacataaagttatcaacacaatttcttagttgttctactgctgttagtgagaaagccttattatcatcatatttagttgcatatcgtgtggcaaaagagaaaatagctaacacagctgctgaaaaaattattcttccagcatgtttggatatggtgcgtacaatatttgatgataaatcagctgataaattaaaaactatacctaatgataacacagtatctcttcgaatttgtactattgcagaacatttagaaacaatgcttattactcgtttacagtctggtatagattttgcaatccagcttgatgaaagcactgatattggaagctgcacaacacttttagtttatgtcagatatgcgtggcaagatgattttttggaggattttttgtgttttttaaatttaacctcacacctaagtggattagatatttttacagaattagaaaggcgcatagttggccaatataaattaaactggaaaaactgtaaaggaattacaagtgatggcacagcaaccatgactggaaaacatagcagagtaattaaaaaattactagaagttactaataatggtgctgtgtggaatcattgttttatacatcgtgaaggtttagcatccagagaaattccacagaatctcatggaggtattgaaaaatgcagtgaaagttgttaattttattaaaggaagctcattgaatagccggcttcttgaaacattttgttcagagattggaactaatcatacccacttactatatcataccaaaattcgttggttgtctcaagggaaaatactaagcagggtttatgagctcaggaatgagattcacttttttctcattgaaaaaaaatctcatttggcaagtatttttgaagatgatacttgggtaacaaaattggcatatttaactgatatttttagcattcttaatgaactgagtttaaaactacaggggaaaaacagtgatgtattccaacatgttgaacgtatccagggatttcgaaagacattattgttatggcaagtaagacttaaaagtaatcgtcctagctattacatgtttccaagatttttgcagcatattgaagagaatattattaatgaaaacattttgaaagaaataaaattagagatattgttgcatctcacttctctgtctcaaacttttaaccatttctttccagaagaaaaatttgaaacattaagggaaaacagttgggtaaaagatccatttgcttttcgacaccctgaatcaataattgagctaaacttggtgcctgaagaagagaatgaattattgcagcttagttcttcatatacattgaagaatgattatgaaaccttaagtttatcagcattttggatgaaggtaaaggaagactttccattgttaagtagaaagagtgtcctgctattgctaccattcacaacaactagtttgtgtgaactagggttttccatcttaacgcagttaaaaacaaaggaaagaaatgggctgaattgtgcagcagttatgcgggtagcattatcttcctgtgttccagactggaatgaacttatgaacaggcaagcacacccatcatagtaaataaaaatcttacctagcttttgtctttgtatttcttattttgtagtatttttctatgttatatttaaatggtactataatactgtgatacttttgttatgttttaatttttgttatatttaataaaattattttatgttcattgaacaaaaatttaatgaatttctgttagaggccaggaactatt

SEQ ID NO: 3403 - DNA, 212 bp, Homo sapiens
  source 1..212: mol_type = other DNA
ttcactgaaccttctctgttgtcctcaaaccttcaactccacctcttctttcctttatccagggcaggtaccctagcatcaaacctcataaagacagaagcaattagatgggaattttctcaactccttggcagtaacttctaatataatctgtatttgtgcccatactttgttcattatctcagtttatagcagaagagatgtcttttctc

SEQ ID NO: 3404 - DNA, 301 bp, Homo sapiens
  source 1..301: mol_type = other DNA
gccgggcacggtggctcacacctgtaatcccagcactttgggaggccaaggcggggtggatcacaaggtcaggagttcaagaccaacgtgacgtgaccaatatggtgaaaccccatctctactaaaaatacaaaaattagctgggcgtggtggcacgtgcctgtaatcccagctacttgggaagctgaggcaggagaattgcttgaacccgggaggcagaggatgcagtgagccgagattgcgccaccgcactccagcctgggtgacagagcaagactccatctcaaagaaacaaacaaaa

SEQ ID NO: 3405 - DNA, 299 bp, Homo sapiens
  source 1..299: mol_type = other DNA
ggccgggcgcagtggcttacacctgtaatcccagcactttgggaggccaaggtgggcagatcacttgaggtcagaagtttgagaccagcctggccaacatcgtgaaaccccatctctacaaaaatacaaaaattagctgggcgtggtggcgggtgcctgtaatcccagctacttgggaggctgaggcagaagaattgcttgaactgggaggcagaggttgcagtgagctgagactgtgccaccacactccagccaaggagacagagtgtggctttgtctcaaaaaaaaaataaaaaaaa

SEQ ID NO: 3406 - DNA, 1064 bp, Homo sapiens
  source 1..1064: mol_type = other DNA
tattgcgggaagtcagggaccccaaacagagggaccggctggagccacagcagaggaacataaattgtgaagatttcatggacatttatcagttcccaaattatacttttataatttcttatgcctatctttactttaatctcttaaccctgatatctttgtaagctgaggatgtacatcacctcaggaccactgtgataattgtgttaactgtacaaattgattgtaaaacgtgtgtttgaacaatatgaaatcagtgcaccttgaaaaagaagagaataacagtgatttttagggaacaagggaagacaaccataaggtctgactgcctgtgaggtcaggcaaaaaaagtcacttttcttcttgcagagagcctataaatggacgtgcaagtaggagagatattgctaaattcttttcctagcaaggaatattaacattaataccttgggaaaggaatgcattcctggggggaggtctataaacggccgctctgggaatgtctgtcttacgtggttgagataaggactgagatacaccctggtctcctccagtaccctcaggcttattagagtggggaaaaactccaccctggtaaatttgtggtcagatcggttctctgctctcgaaccctgttttctattgtttaagatgtttatcaagacaatacgtgcaccactgaacagagacccttatcagtagttctgcttttgccctttgccttgtgatctttgttggatccttgtcagtagttctgcttttgccatttgtcctgttccctcagaagcatgtgatctttgttctgctttttgccctttgaagcatgtgatctttgtatctactccctgttttacaccccctcccctttagaaacccttaataaaaagcttgctggtttgaggctcaggtgggcatcacggtcctactgatatgtgatgtcacccccagtggcccagctgtaaaattcctctcttggtaccctttctctttatttctcagctggccaacacttatggaaaatagaaagaacctacattgaaatattgggggcaggttaccctgat

SEQ ID NO: 3407 - DNA, 371 bp, Homo sapiens
  source 1..371: mol_type = other DNA
caaataattgggattaaataaaccacgtattgtaaccagctttccaagtaagttacaaataaaaactaaaagataactcacaagaatctataagtttgtgagttttaaatgaggtcaaaataatggatgaaggaaagaggaaattgaaatggaaatttaaaatacttatgaatgaataattaacatactacctgtgacacttaagaaaccagctaaaatatttagacaaaaatatacaaccattaatgctaatatttacaaaagaaaaatgtggaaaatcaaatttaatatttaacctaagaaatgagtaaaatataagcagaataaattcaggaaaattacatggtaagaagtagtaaagatactcatgg

SEQ ID NO: 3408 - DNA, 307 bp, Homo sapiens
  source 1..307: mol_type = other DNA
ggctgggcgcggtggctcatgcctgtaattccagcattttgggaggccgaggcgggcggatcacctgaggtcaggaattcaagaccagccttaccaacatggagaaaccccgtctccactaaaaataaaaaaattagccaggtgtggtggtgcacgcctgtaatcctagctactcaggaggctgaggcaggagaatagcttgaacctgggaggtggaggtggtgagccaagatcgcaccattgcactccagcctgggcaacaaaagcaaaactccatctcaaaaaaaaaaaaaaaaaaaaaaaaaaa

SEQ ID NO: 3409 - DNA, 71 bp, Homo sapiens
  source 1..71: mol_type = other DNA
gtgtctgcgaaccctagctcagtacctggcattccatgggcaggcaagaaaagtttgcagaatgaattaat

SEQ ID NO: 3410 - DNA, 209 bp, Homo sapiens
  source 1..209: mol_type = other DNA
gaggccgaggcaggtggatcacctgaggtgaaaccccgtctctattaaaaatacaaaaaattagctgagcgtggtggtgctgaggcagaagaattgcttgaacccaggaggtggagactgcagtgggctaagatcatgccactgcactccagcctgggcaacagagcaagattccgtctcaaaaaagaaaaaaaaaaaaaaaaaaaaga

SEQ ID NO: 3411 - DNA, 6049 bp, Homo sapiens
  source 1..6049: mol_type = other DNA
agatggccaaatgggaacagctccggtctgcaacccccagcaagatcaatgcagaaggcaggtgatttcttcatttccagctgaggtacccagctcatctcattgggactggttagatagtgggtgcagcccatggagggcgagcagaagcagggtggggtgtcacctcacatgggaagtgcaaggggtggaggaactccctcccctagccaagggaagccgtgagggactgtgccatgagggacggtgcattccaggccagataccacgcttttcccacggtttttgcaaccatagaccagatgcctgtgccaccaaggccctgagttttaagcacaaaactgggcagccatttggccagacactgagctagctgcaggagtttcttttcgtaccccagtgactcctggaacaccagcgagacagaaccattcactccctggaaagggggctcaagctagggagccaagtggtctagctcagtggatctgaccccctatggagcccagcaagctaagatccactggcttgaaattctcactgccaccaagcattctgaagtcgacctgggacaccccagcttggtgagggaggggtgtctgccattactgaggcttgagtaggcagttatcccctcacggtataaaaaaaagcctccaggaaatttgaaatgggcagagcccaccacagcttggcaaagccactgtagccagactgcctctctagattcctcctctctgggcagggaatctctgaaagaaaggcagcagtcccagtcaggggctcatagggaaaactcccatctccctgagacacagcacctgggggaaggggtggcggtgggtgcagcttcagcagacttaaacattcctgcctgccagctctgaagagagcagcagatcttgcagcacagtgctcaagctctgctaagggacagactgcctcctcaagtgggtccctgacccccatgcctcctgactgggagacacctcctgactgggagacgcctcccagcaggggtcgacagacatctcatacaggacagctccagctggcatctggtgggtgcccctctgggacaaagcttccagaggaaagaacaggcagcaatctttgctgttctgcagcctccgctggtgatacccaggtaaacagggtctggagtggacctccagcaaactccagcagacctgcagtagagggccctgactgttagaaggaaaactaacaaacagaaaggaatagattcaacatcaacaaaaaggatgtccacaccaaaaccccatttgaaagtcaccaacatcaaataccaaaggtagataaatccacgaagatggggagaaaccaatgcaaaagggctgaaaattgcaaaaatgagaatgcctcttctcctccaaaggatcacaactcctcaccagcaagggaacaaaactggacagagaatgagtttgacgaactgacagaagtaggcttcagaaggtggataataacaaactcctccgagctgaaggagcacgttctaacccaatgcaaggaagctaagaagcttgaaaaaaggttagatgcattgctaactagaataaccagtttagagaagaacataaatgacctgatggagctgaaaaacacagcacgagaacttcgtgaagtatacaaaagtatcaacagctgaatcgatcaagtggaagacaggatatcagagattgaagatcaacttaacgaaataaagcatgaagacaagattagagaaaaaagaatgaaaaggaatgaacaaagcctccaagaattagggaactaatgtgaaaagtccaaacctacgtttgactagtgcacctgaaagtgacggggagaatggaaccaagttggaaaacactcttcaggatattatcaaggagaacttccccaacctagcaagataggccaacattcaaattcaggaaatacagagaaaacaaagatactcctcgagaagagcaaccccaagattcataatcatcaaattcaccaaggttgaagaaatgaaggaaaaaatgttatcggcagccagagagaaagatcctcctttggaggatcacaaaaggtcaggttacccacaagaggaagcccatcagactaacagcagatctctctgcagaaaccctacaagccagaaaagagtggggaccaatattcaacattcttaaagagaagacttttcaacccagaatttcatatccaaccaaactaagcttcataagcgaaggagaaataaaatcctttacacacaagcaaatgctaagagattttgtcatcaccaggcctgacttacaagagctcctgaaggaagcactaaacatggaaaggaacaattggtcccagcaactgcaaaaacataccaaactgtaaagaccatcaacactatgaagaaactgcatcaactaacgggcaaaataaccagctagcatcataatgacaggatcaaattcacacataataatattaaccttaaatgtaaatggactaaatgccccaattaaaagacacagactggcaaactggataaagaatcaagacccatcggtgtcctatattcaggagacccatctcacgtgcaaagacacacataggctcaaaataaatggaagaatatttaccaagcaaataaaaaaagcaaaaaaaaaaaaaagtggttgcaatcctagtctctgataaaacagactttaaaccaacaaagatcaaaagagacaaagaacggcattacataatggtaaagggatcaatgcaacaagaagagctaactatcctaaatatatatgcacccaatacaggaacatccagattcataaagcaagttcttagagacctacaaagagacttagactcccacacaataatagtgggagactttaacaccccactgtcaataccagacagatcaacaagacagaaaattaacaaggatattcaggactggagctcagctctgcaccaagtaaacctaacagacatctacagaactctccaccccaaatcaacagaatatacattcttctcagcaccatatcacagttattctaaaatttatcacataattggaagtaaaacactcttaggcaaatgcaaaagaatggaaatcataacaaacagtctgtcagaccacagtgcaatctaattagaatttaggattaagaaactcactcaaaaccacgtaattacatagaaactgaacaacctgctcctgaatgactactgggtaaataacaaaattaaggcagaaataaataagttctttgaaactaacgagaacaaagacacaatgtaccagaatctctgggacacagctaaagcagtatttagagggaaatttatagcactaaatgcccacaagagaaagcaggaaagatctaaaatcaacactctaacatccctatgaaaagaactacagaagcaagcacaaataaattcaaaagctagcagaagacaagaaataactaagatcagagcagaattgaaggagatagagacacgaaaaatccttcaaaaaatcaatgaatccagaagctggttttttgacaagatcaacaaaatagaccactagccaggctactaaagaagaaaaaagagaagaatcaaataaacgcaataaaaaatgacacaggggatatcaccaccaatcccacagaaatacaaactaccatcagggaatcctataaaaacctctatgcaaataaactagaaaatctagaagaaatggataaattcctggacacataaaccctcccaagactaaatcaggaagaatagaccaataacaagttctaaagttgaggcagtaattaatagcctaacaaccaaaaaaagtccaggactagacggattcacagccaaattctaccagaggtacaaagaagaactggtaccattccttctgaaactattctaaacaatagtaaaaaagggaatcctccctaactcattttatgaggccagcatcatcctgataccaaaacctggcagagacaaaacaaaaaaaagaaaatttcaggccgatatccctgatgaacatcgttgcaaaaatcctcaataaaatactggcagacagaatccagcagcacatcaaaaagcttatctaccacgatcaagtcgacttcatccatgggatgcaaggctgcttcaacatatgcaaatcaataaacgtaatccatcacataaacagaatcaatgacaaaaaccacatgattatctcaacagatgcagaaaaggcctctgacaaaattcaacaccccttcatgcaaaaaactctcaataaactaggtagtgatggaatgtatctcaaaataataagagctatttatgacaaacccacagccaatatcatactgaacgggaaaaagctggaagcattccctttgaaaaccggcacaagacaagaacgcccactctcaccactccaattcaacatagtactggaagttctggacagggcaatcaggcaagagaaagaaataaagggtattcaaataggaagagaggaagtcaaattttctgtttgcagatgacatgattgcatatatagaaaaccccattatctcagtccaaactcttcttaagctgataagcaacgtcagcaaagtctcaggatacaaaatcagtgagcaaaaatcacaagcattcctatacaccaataacagagagccaagacgtgagtgaactcccatttgcaattgctacaaagagaataaaatacttaggaacccaacttacaagggatgtgaaggatctcttcaaggagaactacaaaccactgctcaacgaaataagagaggacacaaacagatggaaaaacattccatgctcatggataggaagaatcaatatcatgaaaatggccatactgcccaaactaatttatagattcaatgctatccccatcaagctaccactgactttcttcacagaattagaaaaaactactttaaatttcatatggaaccaaaaaaagagcccgcatagacaagacaatcctaagcaaaaagaataaagctggaggcatcatgctacctgacttcaaactatactataatgctacagtaataaaaacagtctggtactggtaccaaaacagatatatagaccaatggaacagaacagaggcctcagaaataacaccacatatctataaccatctgatctttgacaaacctgactaaaacaaacaatggggaaagaattccttatttaatacatgctgctgggaaaactggctagccatatgcagaaaactgaaactgaaccccttccttacaccttatacaaaaattaactcaagaggaattaaagactgaaatgtaagacctaaaaccataaaaaccctagaaggaaacctaggcaataccattcaggacacaggcatgggcaaagacttcattactaaaataccaaaagcaatggcaacaaaagccaaaattgacaaatgggatctaattaaactaaatagcttctgcacagcaaaataaactatcatcagagtgaacaggcaacctacagaataggagaaaatctttgcaatctacccatctgacaaagggctaatgtccagaatctacaaagaacttaaacaaatttacaagaaaaaaaaaacatcaaaaagtgggtgaagaatatgaacagacacttctcaaaagaagacatttatgcagccaacaaacatatgtaaaaaagctcatcatcactggtcattagagaaatgcaaatcaaaaccacaatgagatatctcatgccagttaaaatggcaatcattaaaagtcaggaaacaacagatgctggagaggatgtggagaaataggaacacttttacactgttggtgggagtgtaaattagttcaaccattgtggaagacagtgtggcgattcctcaaggatctagaaccagaaataccatttggcccagcaatcccattactgggcatatacccaaaggattataaatcattctactataaagacaacgcacacgtatgtatactgcagcactgttcacaatagcaaagactaggaaccaacccaaatg

SEQ ID NO: 3412 - DNA, 1860 bp, Homo sapiens
  source 1..1860: mol_type = other DNA
ctgtttcaacatctgaagatcaattaatgtaatccatcacatcaataagctaaagaagaaaaatcacatgatcatatctatacatgccaaaaaaaaaaaagcatttgacaaaatccagcacccatttctgattttaaaaaatctcagaaaacctaaattagagaggaacttccacaatttcataaagaacatctccaaaaaacctacagctaacatatttaatggaaacttgaagctttccggccaacatcaggaacaagacaaagatgtccttctcaacattacttttcaacatcatattggaagttctagctaatgcaataagacaaggaaagaaaacacaaggtatacagactgggaaggaagaaatataactgtctttgtttgcagatgacatgattgtctatgtagaaaattcaaaagaaacaccaaaacccctctcaaaaaaagtgatgatagcaaagttgcaggatagaaggttaataaacaaaagtcaattgctttcctatatataaacaaggaacaagtagaatttgaaattaaaaacacattatcactttcattagcaccccccaacatgtaatacataggttacaaatctaaaaaaatatgcacgggtatgaggaaaactaaaaaattctgatgaaatacatcaaagatatatttcaggtctaacatgaagtattggaagattgaatatcgtcaagatgtcagttcttcccaagctgatctacagattcaacacaatcccaatcaaaatcccagcatgttagtctttagatatggacaaacttattataaagcttatatggaaagacaaaagaaccggaatagccaactcagtattgaagaacaaagctggatgactgaaaatacctgatttcaagacttaatcagtagaacagaacagagagcacagaaatagactgacataaaaatcctttgtcaaccaatcactgacaaaggagcaaaggcaattcaaagaaacaaatatagtcttttcaagagatgtggaacaactgggcatccacatgcaaaaaaatgaatctagacacagaccttatatccttcacaaaaattaactcaaatggatcacagatctaaagataaaacattaaactataaaactcctagaagataacataggagaaaacccaaatgaacttgggtatggtgataacttttcagttataacaccagagacacaatccatgaaagaaacaattgatatgctggacttcattacaacaaaaaagttccactctgcaaaacaaaatattaagggaatgagaagatgagccacaaagaaaaagaaaatatctgccaaagacatacctgataaaggactgttaaataaaatatacaaagaacttttaaaactcaacaatataaaaatgaattttaaaatgggcaaaaggcctgaacagacaactcatcaagaaagatatacagatggcatgaagcatatgaaaaaatgttgaatatgtcattagggaattgtaattaaaatgagataccactacacactgattaaattggccaaaatccgaaacactgacaacactaaatgctggagaggatgtggggcaacaggaattcttaatcactgctggcaggaacgcataatggtatagccactttggaagacagcttggtgacttcttacaaaatcaaacatactcttaagacatgatccagcaatcatcctcttggcatctgtttaaatacttaaaaaatttatgtccacaaaaaaacctacacacaaatgtttgtagaagctttattcataattgccataacttaaaagcaaccaagatgtccttcagtagaataatggataaagtgtagtacatccattct

SEQ ID NO: 3413 - DNA, 258 bp, Homo sapiens
  source 1..258: mol_type = other DNA
ggccaggcgcagtggcccacgcctgtaattccaccactttgggaggctcacgcaggcagattgcttgagctgaggagttgagaccagcctgggcagcatggcaaaaccccatctctactaaaaatacaaaaaaattagctgggcatggtggcgtgtgcccgtagtgccagctacttgggtggctgaggcgggagtatcacttgagcccaggtggtcaacgctgcagtgagccaagaccatgccccactgcactccagc

SEQ ID NO: 3414 - DNA, 302 bp, Homo sapiens
  source 1..302: mol_type = other DNA
gccagacacggtggctcatgcctgtaatcccagcactttgggaggcctaggcaggtggatcacgaggtcaggagatagagaccatcctggccgatgtggtgacaccctgtctctactaaaaatacaaaaaattagctgggtgtggtggtgcatgcctgtaaccccagatactcgggaggctgaggcaggagaattgcttgaacctgggaggcggagattgcagtgagccgagatcgacccactgcactccagcctgggtgacagaccaagacttcatctcaaaaaaaaaaaaaaaaaaaaaa

SEQ ID NO: 3415 - DNA, 1999 bp, Homo sapiens
  source 1..1999: mol_type = other DNA
aaaaatctgtatcagacatgatacataatagcgaaacatgaaaagcctttcttttgaaactggaaatgagacatttttgcctgctaacacctcttttataatgttgttctagagtcctgaacctgtagtagcacaagaaaaaagggaataaaaaatgaaggaaaactcaacgatttgaaaatggtatgattgaatgcattgaaacccaaacacaaatacatttatatttttattggataagaaattttagcagggttgctggatataaaaattagtttggaaaattagcttattttatatatatttaagcaacaaaaaaggaaaatgaaatattaaaaagatactatttacaatagtgtcagaaatatcaaatatatatagagatataataaaagatcagtgaaacttctgcatagcaacaaatacaattatattaagaaacattacagaagacctaaatgaattgaaaatcatgattggaaggctcaatgttgaagaagtcgctcgtctctcaggttaatgtatggatttgatgcaatatcatccaaaatcccaaaaggccttttttgttgttgttgttgttgtcttattgttcatttggttggtttttcttttttctggaacttaagctgattctaaaatgtataaggaaatacaaagggtcaagaataaccaagtctgtgttttgacgaaaaaaaaataaggtagaagatctatacttctaggttatcaaaatttttctgaacgacttttataattaagactgtggaattggcaaagtacaatggaaagactaggcttcagaaacagacctacatacatacaacttgatttatgacaaaggtgacactgtaaaagaatggaatatggatagattttccagtgaatggtacttggtcaaatgggtagcatatacaaaataaaattgtacctcaaccactgtgcacaaaaatcaatcataatcttaaatgagaaaggcaatacaatgaagctgttagaagataatgtagaaaaatatcttcatgatttggggataaggaacttacttaagtcacaaaaatcatcagtcagaaaagaaaagatagatatattttttcctcattaaaagactttaaacaaaagttgccactgcagagtcaaaaggcaaattatgaagtaggcaaagatgtgtgcaatatgtaaaattgtgaaaaggctgttattcagaaaacatgaataactactacaaatcaacagaaaaagacacaatcccaatagaaaaataggcaaaagacctaactaggaacttccaaacgagaaatccaaaagaccaattaatatataatctcattagtaactaagaatgttcaaattaaaatcacaattagataccatacatacctacttgatcttttttagaaagtacaatatcaaatggtaggcaaagatacagaactctcatatattgcttaaggaagtgtaaaagtttggaaatatctagtaaagttgaatctacgcctaccttaaaactcagcaattctgtttacatatgtaagcaaggagctggaagttctcactccaacttaacaacatatatatcttactgacctgcagtcacgtatgtatcaggatacatgtacaagaataagaatgttcatggcaacattcttttaatagccctaaacgggaaacaatccatatgtctatcaacaatagaatggatatattgtagtttattcataccataatgaagagaaagaattaaactacataaaagtagacctttgaaaaacagagtaaatgaacccaaagaaaacagaatataaagtatatgagtccacttatataaagttcaaaaacagcaaaactgaaaaaaaaagttgaagaactatgtggcaaaactgtaatgaaaaacgaggtaacaaataccataaaagtcaagatagctactcctgctagctgggagatgggatttatgatgaagaagtggcaggtgatggctttctggcatgttgtcaat

SEQ ID NO: 3416 - DNA, 161 bp, Homo sapiens
  source 1..161: mol_type = other DNA
aagatcatctgggtggggtggcgcgcgtctgtaatcccagctactcgggaggctgaggcaggagaatcgcttgaactcgagaggcggaggttgcaggatcgcgccactgcactgcactccatcctgggcgacagagcaaactgtctcaaaagaaaaaaaaa

SEQ ID NO: 3417 - DNA, 132 bp, Homo sapiens
  source 1..132: mol_type = other DNA
tggttctcaaagtgtggttcccagaacagcagcttcagcatcacctgagtttttaaaattgcatatccatccttggactcctccccagacctactgaatcagaaactctggaggtaggacccagcaattatg

SEQ ID NO: 3418 - DNA, 203 bp, Homo sapiens
  source 1..203: mol_type = other DNA
ggcttggtagaagaaaaatctgttcttaatcagaacacgtgggttctaatcccagtgttgatattagctagttatgtgggatagtactggtcacttcaactctgcacctttccttggtaagatggttatatctaccttttctatttcacagatttcttagaaggatgaaaatatgatgacatctgttgaaagtaatttgaaaa

SEQ ID NO: 3419 - DNA, 66 bp, Homo sapiens
  source 1..66: mol_type = other DNA
agagaaaaggaaaacacagtttttttgcaacgtatctgactgggtgagaagccactgctgcagcat

SEQ ID NO: 3420 - DNA, 892 bp, Homo sapiens
  source 1..892: mol_type = other DNA
actattacttcaggccaagattgaataactaggactggatttacctttatacctgaaacaacaaaagattgaacaaaatgtatgaaacaattgtttccaagacaaagggcagtatgtaataaaatacaaagatctctgaaagagggaatacaaatgaaatgagccctataattgccttgttactgccctgaaggaatttccaggcagtggtgcaaaaaagaaaaacccaggcagagtgctgaactccgtgagttgaaagattgaacggagaatacggagagacctagacagcagcagttaaaagaacagagtagccgagggaatagagctgcacaaagagagaagtgtggagatccacagagggtttgccttcagtatttagcagagcactgattcacaaatgcacataaagaaacctcaagaaagaaccacctgaaaggattaaaaggaatagcaccagttgctcacacagagctagaaatagtagtgtttgtttctaccagtaagggtagaacatctcataattctcaagtcacagggtagacattgagaagagttttgcctcagtagttaaaataatttgacaaaacactgctctggtcccaaccaacaaacttaaaaggaatctttgaaaagattacattatatccaagtaattaactgcatcctggaacatagttccacagtattttttctaaaaaagaaaaatttcaaaatttctagcaggcaatcaaaaattactatgcatacaatgaagtaggaaaatatactctcaaaaagaaagaaaataatctctccaaacagaaccagatctcaactaaatatgatagttagcaggcaataatattaaaacagttattacaactatagtccaaatgttcaaaagttcagt

SEQ ID NO: 3421 - DNA, 166 bp, Homo sapiens
  source 1..166: mol_type = other DNA
acattggtcaataggtacaaacataaagaaaagaaataagttctaatgtttgatagcagaatagggtgactatacatagcaataatattttgtacatgtcaaagtaactaaaagagaggatttgaaatattcccaacacatagaaataacaaatactccataatgg

SEQ ID NO: 3422 - DNA, 370 bp, Homo sapiens
  source 1..370: mol_type = other DNA
atgtacaagaaataaacaaatttacaagaaaaaaacaaccccaccaaaaagtgggtgaaggatatgaacagacacttctcaaaagaagacatttatgcagcccacaaacagaaaaaaaagctcatcatcactggtcattagagaaatgcaaatcaaaaccacaatgagataccatctgaagccagttagaatggcgatcattaaaaagtcaggaaacaacagatgctggcgcggctgtggagaaacaggaacgcttttacactgttggtgggagtgtaattaattcaaccattgtggaagacagtgtggcaattcctcaaggatctagaaccagaaataccatttgactcagcaataccattatggagta

SEQ ID NO: 3423 - DNA, 2750 bp, Homo sapiens
  source 1..2750: mol_type = other DNA
atgaaaataagcttctagaaatggttaaatttctgaacattgctctcaagactaaaccaggaagaagtcaaatccatgaatagaccaataacaagttctgaaattgaggcagtaattaatagcctgccaaccaaaaaaagcccaggaccagacagattcatatccgaattctaccagaggtacaaagaggagctggtaccattctttctaaaactgttccaaacaatagaaaaagagggactcctctctaactcattttatgaggccggcatcatcctcgtaccaaaacctggcagagacacaacaaacaaagaaaatctcaggccaatatccctgatgaacatcgatgcgaaaaccctcaataaaatactggcaaaccgaatccagcagcacatcaaaaagcttatccaccacaatcacattggcttcatccctgggatgtaaggctggttaaacatatgcaaatcaatacacatcatccatcacataaacagaaccaatgacaaaaaccacatgattatctcaatggatgcagaaaaggccttcgataaaattcaacatctcttcatgctaaaatctttgaataaactagatactgatggaatgtatctcaaaataataagagctacttatgagaaactcacagccaatatcattctgaatgggcaaaagctggaagcattccctttgaaaaccggcacaagacaggcatatcctctcacaccactcctattcaagaatagtattggaagttctggccagggcaatcaggtaagagaaagaaataaaaggtattcaaataggaatagaggaagtcaaattgtctctttgcagatgacatgattgcatatttagaaaaccccattgtctcagcccaaatctccttaagctgataagcaacttcagcaaagtctcaggatacaaaatcaatgtacaaaaatcacaagcattcatatacaccaatgacagacaaacagagagccaaatcatgagtgagctcccattcacaattgctacaaagagaatacaatacctaggaatacagcttacaagggatgtgaagaagctctttaaggagaactacaaaccacttctcaaggaaataagagaggacacaaacaaatggaaaaacactccatgttaatggataggaagaatctatatagtgaaaatggccaaactgcccaaagtaatttatagattcaatgctatctccatcaagataccattaactttcttcacagaattagaaaaaaaaactactttaaatttcatatagtacaaaaaaagaacctgtacagccaagacaatcctaagcaaaaagatcaaagctggaggcatcacgctacctgacttcaaactatactacaaggctacagtaaccaaaatagcatggtactggtaccaaaacagatatatagaccaacggaacagaacagagccctcagaaataacgccacacttctacaaccatctgatctttgaaaaacctgacaaaaaacaagcaatggggagtggattccctatttaataaatggtgttgggaaaactggctagccatacgcagaaaactgaaactggaccccttccttacaccttatacaaaaattaactgaagatggattaaagacttaaacataagacctaaaacctcaagaactctagaagaaaacctaggcaataccattcaggacataggcatgggcaaatacttcatgactaaaacaccaaaagcaatggcaacaaaagccaaaactggcaaatgggagctaattaaactaaagagcttctgcacagcaaaagaaactatcatcagagtgaacaggcaacctacagaatgggagaaaatttttgccatctctccatctgacaaaggaataatatccagaatctacaaggaactgaaacaaatttagaagaaaaaaacaaccccatcaaaaagtgggtaaaggataagaacatacacttctcaaaagaagacatttatgtggccaacaaacatatttaaaaaagctcatcatcactggtcattagagaaatgcaaatcaaaaccacaatgagataccatctcacgccagttagaatggtgatcattaaaatgtcaggaaacaacagatgctggagaagatgtggagaaatagaaacacttttacattgttgttgggagtgtaaattagttcaaccgttgtggaagacagtgtggcaattcctctaggatctagaaccagaaatacctttgacccagaaatcccattactgggtatatacccaaaggattataaatcattcttctataaacatgcacacgtatgtttattgccgcactgttcacaatagcaaagacttggaaccaacccaaatgcccatcagtgacagactggataaagaaaatgtggcacatgtacaccattgaatactatgcagccataaaaaagatgagttcatgtcctttgcagggacatggatgaaaccatcattctcagcaaactaacacaggaacagaaaaccaaacactgcatgttctcactcataagggggaattgaacaatgagaacacatggacacagagaggggaacatcacacaccagggcctgttgcgggaggtggtggggttaggggagggatagcatttggagaaatacctaatgtagatgacaggttgatgggtgcagcaaaccaccatggcatgtgtatacctatgtgacaaacctgcatgttctacacatgtatcacagaacttaaagtataa

SEQ ID NO: 3424 - DNA, 2637 bp, Homo sapiens
  source 1..2637: mol_type = other DNA
ttatatctataaaagaaattaaatcaataataaataaccttccaaaacagaaagcagcaaatgaagatgggtctactattgaattctaccaaatatttaagaaagaaaccaattctttaaaatctcttacagaaaataggagtggagggaatatttcctaatttattttacaagtccagtattaccttaataccagaaccatacaaagacaacacaagagaaaactacaacaaatatcaaacctagatacaaaaatcctcaataaaatattagcaaatcaaatccaacaatgtataaaaagaattatatatcatgaccaaaagtgatttattagtgtatgaaaatctagttaaatattcaaaaatcaattaatgtaatccatcacatcacaaagccaaagaataaaaatcacgattatgacaacagatgcagaataaacatttgacaacccattaatgataaaaactttcagcaaactagggatcgaggtgaactttctcaacttggtaaagaatagctaagaaaaatctacacttaatatcacacttaatgacaattaactagaagctttcctgctatggtgaggaggatgtccttgctcatcactcgttttcaatattgtaatggaaattccagctaaagcaataagacaagaaaaggaaataaaaggtattaatattaggaaggaagaagtaaaacttcatttgcagatggcataattgtctacatgggaaatctcaaagaatcaacaaattactaaattaataaaatattattttcagtctgcaggataccaggttaatatataatagtcaatcactttcttatatgccagcaatgagcatttggaatttgaaataaaaaacaaaatgtcatttacattaccattagagaaatgaaatacctaggtataaatctaacaaaatatacacaagaactatatgaaaaactacaacattctgattaatgaagtcagacaagatctacataaatggaggtaccccatgtacatggatagaaagagtcaatattgtcaagatgtcagttcttcccaattagatctatagttgcaatgtaatcccaatctaaatctcagccaattattttcaagttatcaataaattgattctaaattttatatggaaagaaacagaaaaaatacaacatcaacagcacgatgttgaaggagaagaacaaagttggaggactgatatcacctgactttaagacttaccacaaagttatagcaatcaaaacagcgtaatactggcaaaagaatagacaaataaatcaatggaacggaatcgagagcgtagtaatagaactacacaaacacagtcaattgatctttggcaaaggagcaaaagcaactcaatgaaaaaaaaaacagccttttaaaccaaagatgctggaacaagtagacatccataggcaaaaaaagaacgaatacagaaggagttattatagctttcacagaaataaacacaaaggacatcatagacctaaatgtaaaccacaaaactgtaaatatcttaggggatgacataggagaaaaatgtaagtgattttaggtttagtgatgaatttttagacagattaccaaacatatgactcatgaaagaaaatattgataagatggacttcattaaaattaatcattgctgcttggcaaaagatgctgtaaagagaattaaaagacaggccaccagctgggagaaaaatctttgcaaaacacatatttgattaatgactggcatccaaaatatatcaagatttcttaaatatctacagtaatagaacagataacccaattaaaaaacggacaataaatctgacctaacatctcaccaaagatgacatagagattatagattatcatatgaaaaaatactccacatcatatgtcatttaaacaactgaaggataaaagaataagatacgtttacacacttgtgagaatggcaaaaatccaaaacactgacaatatcagatgctggcaaggatgtagagaaataggagttctcattcattgatgggctggtagagatgcaaaatggtacagccattttagaaaacagtttggcagtattttataaaactaaaaatacatttggcatatgattctaggtatttacctacatgaattaaaaactttagactacacaaaatttatggatatttatggcagtttcattcataattgcaaataacttggaaacaaccaatatatccttcactaggcgaatagataaattgtagcacttccatgcaatgtaatgttttacaacaataaaaagtaatgagctatcaagccatgaaaagataaggaatcttaaatacatattattaggtaaaagaagctaattgaaaaggctatgtactatatgactgcaactatatgacattttggaaaagacaaaatgtctatagagacaataaagtgatcagtggtggcagaggtctagtacaaggagggagagaaggcagagcacaggggattcttagggcagtgagactattctgtacaatactctaatagtagataggtatcatcatacatttgtcaaaactcaaagaatgtgcaacacgattgattgaccccaaatgtaaactatggacattaatagtaatatatca

SEQ ID NO: 3425 - DNA, 2694 bp, Homo sapiens
  source 1..2694: mol_type = other DNA
aataggtaactggagtcctcctatatgcattaaataaactgagttaatagttgtaaagcttgcaacaaagaaaactccagatgcttccctggggagtctgacccgccatttaaggaaaatataatagcagcagttctatcacaaaacctgccagaaagaaagaataacgaaaatcattcccaacccattttatgaagccagcattccctgatgccaaaagcagacaaaaataaaataacactctagactaatatatctcaggagcatagatgcaaacttcctcaaggaaattttaagcaaattgaaaccaatatgcaacatgtataggccaagtgggctttattctaagaaagcaaggaaatggtttcaaatggtttaacatttgaaatttaattagtgtaattcaccataagaacagattaaaaaagaaaaaccttataatcaccacaatagacatagaaaaagcattagacaaagttttagcatccattcacgataaatttctttaactaggaatagaagtaaacttccttaacctgttaaaggacattttaaaaatcacagagggagatggaattttgtctgctgagacaggaccttcaaaatagaaagctctgcatggtatataaagagctccaaagaagcatgagaaatacagtgcaactgcgttatcaccatgaaattaaggcattgtttaaaatatttgttaagccactttccattctatgtatctgtctgatacgttatgcaataatcacagccacttgaagagttggaggtcctttaaaatctgattatagattatctgtcctcatagctttcctccttcgttttggtcctttaaattctcccctccccatctttgaggcaccttgtgctatattgatttattatttaacttgataccagggatgcagcctgcaataaaagtcacttgacaaaataaaattgcgttatgttctatgactcccacaaaaaatgaaaaccatttacaaatagcaccaaaatatataaaataggtataaaccgaacacaatatgtacatgccgtttatgcagaaaaatacaaaatagccatgaaagaaaacaaagacctaaatagaaagatacaccacattaattgattggaggactcaatattaaattgtcaattctctctaaacctatctatagattcagtgcaacctcaataaaaataccaccaagaagttttataggttgattctcaaattcatatggaaaggcaaaggaagtagaatagccaaagcaattttaaaaatgaacagaattggagaagtcatgctaattcattttaagacttattctacagccatcataatcaaaactgtgtggcattggtgagaggatagatatatacattaatggaatagagaacaaactctagagataaacccacatcacaatttcagcttatttttgacaaagatacatagagtattaagtggagaaaagcaaagtattttaaacaaatgatactggaagaattagacaccatgtataaagaaatgaaccttgaactttgacctaacttgtacattataaagacattaactcaaaatggatataaaacataactgtaaaacattaacttacaaagcttttaagagaaagcaaaggaaaaaatctttttgaccttatgttaagcaaatatttcctaggacaaacacaaaaagtctcgttttgaaagaaaaagttgatatccatcaaaatggaagacacttattttgtgtcttattttgtgacacattaaggaaatgaaatgacaaaccgtatactgggggaaatcatttgcgaaacatatacctgataagagactgatatcctaaatatataaagaataataaaaacccactaacaagaaaacagagggcaaacaacttacatagacacttcactaagaaagatatacaggtggcaaatagtcataaaaatacataaaatattattagtcagtagagaaatgcaaatcaaactgacaatgagataacacaatacacctatgggaatagttttttttaaaaaaggaaaacagaacaaaaatccaagcaaagaaaaccaaaaaaacctgacaataccaagtcctgacagtggacagctggaattctcaaacatcgttgtgggactgctaaatggtacaaccactttgaaaaatggcttggctgttttttataaaatcaaaaatacacttaaaatgttccagcaagccctcccttatgtatttacccgagataaataaaaatgtatgttgactcaaaaatctgttaagcgcaggtttataatggttttatctgttgtcattaaaaattgggaataatctgtgaccttcagctgctgaatgggcgaactctggtgcagccatagatggaattctactcagcagtaaagaatgaagaaactctcaataacataggacatggatgaatcttaaatgcatgctcagtgaaagaagccagactctaaaggcaatcaatcaatttatgtgacactctcaaaaggcaatcaagataaaaaacaaagcagtgcttaagagtggttggaagtgaggcaagtggttgactacagatggacaagacaatttatgaaaaattgttctatctctcaattacaatgatgtttatgtgactgcatacattttccaagatttttagaattttattctaaaaaggatgagttt

SEQ ID NO: 3426 - DNA, 1000 bp, Homo sapiens
  source 1..1000: mol_type = other DNA
ggatcaagcagcaatttccacttccaagtcttattatttaagaactatatctcacaaggcaatagctgccatacatagtgattcctctaatggatctggacaaagtcaattgaaaaccttctggaaagaatttaccattctagatgcccttaagaacattcacgattcataggaggagatcaaatatcagtattaataggagtttggaatagattgattccagtcttcatggataaccttgaggggctcaagccttcagtggaggaagtaactgcagatgtggtagaaatagcaagagaactagaattagaagtggagcctgaagatgtgactgaattgctgcaatgtcatgatgaaacttgaatggatgagaagttgctttctatggatgaataatgaaagtggttccttaaaatggaatttacttctggtaaagatgcagtgatattgttgaaatgacaacaaaggttctagagtattacataaacttagttgataaagcagcggtaggatttactccaattttgaaagttctactatgagtaaaatgctaaccaacagcatcacatgctacagagaaatctttcatgaaaggaagagtcagttgatgcagcaattatattgccttaaaataagacaaatgcaattcattatcttattgtaagaaattgcccaaccaccttcagcaaccaccaccctgatcagtcagcagccgtcaacagggaggcaaggccctccaccagcaaaaagattatgacttgctgaaggctcagattattataagcatttttctagcaataaagtattttaaaattaaggtatatacattgggttttttttagacataatgctattgcacactttatagaatttagcatagtgtaaacataacttttatatgcactgggaaatcaaaaaattcatgtgacttgctttattgtgatgttggctttattgcagttgtttagaatgcaaccccaaatacctctaaggcatgcct

SEQ ID NO: 3427 - DNA, 305 bp, Homo sapiens
  source 1..305: mol_type = other DNA
ggccgggtgcggtggctcacgcctgtaatctcagcactttgagaggcaggacgagctgggtggatcagttgaagccaggtgtttgagaccaacctgagcaacatagtgagaccgtctctactaaaattacaaacagtagccgggtgtggtggcacacgcctgtaatcccagctactcgggaagctgaagcacgagaatcgcttgaacccatgaggcagaggttgcagtgagccgagatcatgccactacactccagcctggacaacagagagagactcagtctcaaacaaaaaggaaaaaaaaaa

SEQ ID NO: 3428 - DNA, 127 bp, Homo sapiens
  source 1..127: mol_type = other DNA
gccgggcgcggtggctcatgcctgtaatcccagcactttgggaggctgaggcgggtggatcacctgaggtcaggagttgaagaccagcctgaccaacatgatgaaaccccatctctaataaaaactt

SEQ ID NO: 3429 - DNA, 278 bp, Homo sapiens
  source 1..278: mol_type = other DNA
cccgtaatcccagcactttgggaggccgaggtgagtagatcacgaagtcaggagatcgagaccatcctggctaacacggtaaaacactgtctctaataaaaatacaaaaaaattagccaggtgtggtggcgggtgcttgtagtcctggctactcgggaggctgaggcaggagaatggcgtgaacccaggaagcggagctggcagtgagccgagatcacgccattgcactccagcctgggagacagagcaagactctgtctcaaaaaaaaaaaaaaaaa

SEQ ID NO: 3430 - DNA, 289 bp, Homo sapiens
  source 1..289: mol_type = other DNA
ggcctggtgcgatggctcacacctgtaatcccagcactttgggagacagaggtgggcgaatcacaaggtcaggagttcgagaccatcctggccaacatggtgtaaccccatgtctaccaaaaatacaaaaaattagctgggcatggtggcgggcacctgtaatcccagctactggggaggctgaggcaggagaatcgcctgagcctgggaggcggaggttgtagtgagctgagatcatgccactgcaacaagcgtgagactccatctcaaaaaaaaaaaaaaaaaaaga

SEQ ID NO: 3431 - DNA, 71 bp, Homo sapiens
  source 1..71: mol_type = other DNA
agtctcctaattaatgacagcttgacttaacaattttccaactttaccatggtgtgaaagaggtatgattc

SEQ ID NO: 3432 - DNA, 83 bp, Homo sapiens
  source 1..83: mol_type = other DNA
cagatggtcaccaacttatgttttaggattttttgactttatgatgggtttatagggatgcagccccatttcaagctgaggag

SEQ ID NO: 3433 - DNA, 268 bp, Homo sapiens
  source 1..268: mol_type = other DNA
ccagcggtacaccagctctggcccagggcaagacagggaatttcccaatcactgagtaggctgtagccactctctccattaggcctgacttcaccatggggaaggggagaccctttcaagggtattctttcctggggtactctcagtcctaggacatcatagctctctttcatccctcttaaaagttaataccattatcagttaacagttttttatattaaaattatccctgttcaagttaatggtatggtttctgtatcctgactgg

SEQ ID NO: 3434 - DNA, 313 bp, Homo sapiens
  source 1..313: mol_type = other DNA
ggtcaaacattattctaggtgtttctgtgagggtgttttatatgagattgacatttaaatcaatcagtgaactctgagtaatgcagactgtcctcctcgatgttagtgggcttgatccagtcaggtgaaggtctgaagagaaaaaaagaccgtcctcttcccagaacaagagaatcctccaacagatacctttggactggaccttgcaccatcagctttcctgggtttccagcctcctgcctcacactccagcttttggacttgttagacttaataataacaacacaagccaatccttttaaggaagtttgtc

SEQ ID NO: 3435 - DNA, 200 bp, Homo sapiens
  source 1..200: mol_type = other DNA
cagtgggtctcaactggggatgattcgcttatctgaacagcatctgcagacatttttggttgtcacaactggtgggatgctgttaacatctagaggatagaggccagggtgctactcaacatcctacaatgcatgggacaactcccacaacaaagaattatccagcccaaaatgtcattagtgctgaggttgagaaatac

SEQ ID NO: 3436 - DNA, 302 bp, Homo sapiens
  source 1..302: mol_type = other DNA
ggccagtgcagtggctcacacctgtaatcccagcactttgggaggctgaggtgggtggatcacttgaggtcaggagttcgagaccagcctggccaacatggtgaaaccctgtctctactaaaaatacagaaaaattagccagggttggtgcatgtgcctgtaatcccagctactcaggaggccaaagcaggagaattgcttgaacccgggaggtggaggttgcagtgaaccaagatcgcaccactgcattccagcctaagcaatagagcgagactccctctcaaaaaaaaaaaaagaagaaa

SEQ ID NO: 3437 - DNA, 130 bp, Homo sapiens
  source 1..130: mol_type = other DNA
ccaggcacggtggcgtgggcctgtagtcccaactacttcgaaggctgaggcaggaggatcacttgatcccaggagttcaaagacagcctgggcaacatagaagaccctgtctcttaaaaaaaaaaaaaaa

SEQ ID NO: 3438 - DNA, 306 bp, Homo sapiens
  source 1..306: mol_type = other DNA
ggccaggcgcggtggctcacgcctgtaatcccaacactttgggaggccaaggagggtggatcacctgaggtcgggagttcaaggacagcctgaccaatatggagaaacctcgtctgtactaaaaatacaaaaattagcaggacatggtggtgcatggctgtaatcccagctactcaggaggctgagacaggagaatggcttgaacccaggaggtggaggttgcggtgagctgagatcgtgccattgcactccagcctgggtaacaagagtgaaactctgtctcaaaacaagataaaaagaaaagaa

SEQ ID NO: 3439 - DNA, 209 bp, Homo sapiens
  source 1..209: mol_type = other DNA
ttctaccacacacccttcatatgtgttctactatctatctagatggttctctcaccttttcacctggcctgttcctcctcacccttcaagtctcagcttaaatgtcacctgatcagggaggccttttcttctcttcccatcccactcagactatattatgttctcatttgctgctgccctttcctttgctgtctttttttagccatacc

SEQ ID NO: 3440 - DNA, 521 bp, Homo sapiens
  source 1..521: mol_type = other DNA
ctctgcttttcctccacttactttaggtgacatatgcatgcttttatatatcctcccatttatgcaggaaattctatattgtctcagtatcattactacagcaattctctctgacttaccctatatgacaagctttcatacttgactgtatcagttccatcatttgcaggtatttgtaccctcttgaaataaacatgctcctgattaataaatgttcttgtcgctccattctccacttttgccaaccaactactgccccatttctgcattcacctctgcagcaaacttcctcagatgaatatactcacatttccaatgcttctcttttgtttctcataagtgtactccaattaggctttctactaaagcctactctactaaaattggtcttatcaatggctctgatgatctcacattgcaaaatcaaaaggatagctcttagtcctcatgctaaaaaaatctaccagccatgtttgaaactattgatcactctctcctcttttttatatttgtttatttga

SEQ ID NO: 3441 - DNA, 1266 bp, Homo sapiens
  source 1..1266: mol_type = other DNA
gggagactttaacacctcactgtcagtattagatcaacgagacagaaggttaacaaggatatccaggaattgaactcagctctgcaccaagcagacctaatagacatctacagaactctccaccccaaatcaacagaatatacattcttctcagcaccacatcacacttattccaaaattgaccacatagttggaagtaaagcactcctcatcaaatgtaaaagaacagaaatcacaacaaactgcctctcagaccacagtgcaatcaaattagaactcaggattaagaaactcactcaaaactgcacagctacatggaaactgaataacctgttcctgaatgactactgggtagataacaaaatgaaggcagaaataaagatgttctttgaaaccagtgagaacaaagacacaacatactagaatctctgggacacatttaaagcagtgtgtagagctggttttttgaaaagatcagcaaaattgatagaccactagcaagactaatgaagaaaagagggaagaatcaaatagacaaaataaaaaatgataaaggggatatcaccatcaatctcacagaaataccaattaccatcagagaatactataaacacctctatgcaaataaactagaatatctagaagtaatgaataaattcctggaaacatatgccctcccaagactaaaccaggaagaagttgaatcactgaatagactaataacaggctctgaaattgaggcaataattaatagcctaccaaacaaaaaaaagtccagggccagacggattcacagccaaattctaccagaggtacaaggaggagctgataccattccttctgaaaatattccaatcaatagaaaaagagggaatcctccctgactcattttacgaggccagcatcatcctaataccaaagcctggcagagacacaacaaaaaaagcattttagaccaaaatccctgatgaacgtcaatgtgaaaatcgtcaataaaatactggcaaaccaaatccagcagcacatcaaaaagcttatccaccaagatcaagttggcttcatccctgggatgcaaggctggttcaacatacacaaatcaataaatggaatccatcacataaacagaaccaaagaaaaaaccacacaattatctcaatagatgcagaaaaggcttttaatgaaattcaacagctcttcatgctaaaaaccctcaataaactaggtattgatggaacgtatctcaaaataataagagctatttatggc

SEQ ID NO: 3442 - DNA, 794 bp, Homo sapiens
  source 1..794: mol_type = other DNA
atttatgcagccaaaaaacacatgaagaaatgctcatcatcactggccatcagagaaatgcaaatcaaaaccactatgagatatcatctcacaccggttagaatggcaatcattaaaaagtcaggaaacaacaggtgctggagaggatgcggagaaataggaacacttttacactgttggtgggactgtaaactagttcaaccattgtggaagtcagtgtggcgattcctcagggatctagaactagaaataccatttgacccagccatcccattactgggtatatacccaaatgagtataaatcatgctgctataaagacacatgcacacgtatgtttattgcggcactattcacaatagcaaagacttggaaccaacccaaatgtccaacaatgatagactggattaagaaaatgtggcacatatacaccatggaatactatgcagccataaaaaatgatgagttcatatcctttgtagggacatggatgaaattggaaaccatcattctcagtaaactatcgcaagaacaaaaaaccaaacaccgcatattctcactcataggtgggaattgaacaatgagatcacatggacacaggaaggggaatatcacactctggggactgtggtggggtcgggggagcggggagggatagcattgggagatatacctaatgctagatgacacattagtgggtgcagcgcacaagcatggcacatgtatacatatgtaactaacctgcacaatgtgcacatgtaccctaaaacttagagtataataaaaaaaaaaaaa

SEQ ID NO: 3443 - DNA, 959 bp, Homo sapiens
  source 1..959: mol_type = other DNA
cccacatatgttcaactgattttcaacaaatgtgtaaagataattcagtttcatcaaatggtgctggaaaaactggacctctagatgcaaaaatatgagccttaatctataccttgtatcatatagaaaatgcaaaatggattatagacataaatgtaaaaccgaaaatgctaaaacatctagaagaaaacatcatggaaaatctttgtggctttgctttatgcaaagatttcttagatacaacaccaaaagcacagtgcataaagaacaaattgatgaattgtactttattaaaattaacaactcctgttcttcaaaagacactgttaagagattgaaaaggcagagattaagagaaattatttgtaatcacatattagtaaaggttttgttttcagaatatgtttaaaaactctttaaaatgagaaaataaacattggggaaaatatttgaacagacactacaccaaggaaaatatgtgtattaaaagatgctccccgctattaatcattaaagaaatgcaaattaaaactacaatacgataccactgcatgccaactggaatggctaaaattaaaaagacagaccatcccaagtgtgggtgaggatgcaaagcaactggtgggttctcaaacactggtggtaggaatgtgaaagggtacaacaactatggaaaacagttgtttaaaaagttaaacgtacacctaccatatcacccactcattctattcctgtgtatccccaagaggaacaatggcatctgtgcacacaaacgcttgtacaggaatgtccatagcagctttttaaataatagtgagaaactagaaacaacctaaatatccaccaatgggagaatgcataaacaaattgtggtacgtctatacaatggaatacttaacaactaaaaagaatgaataactgatgcatacaacaacatgcataacactcaaaagcattat

SEQ ID NO: 3444 - DNA, 147 bp, Homo sapiens
  source 1..147: mol_type = other DNA
caggagacatggcctctagctctgttcaactgtcaattctgctggggaccttagataaatctgttaacctctctgccctcagtttccccatctttaactcgagagtgtagatctaaatgctagaagagtactaagggactcttccag

SEQ ID NO: 3445 - DNA, 3324 bp, Homo sapiens
  source 1..3324: mol_type = other DNA
tcactcacataggattccataacactgctacaaggctctgagtgtttgtccctcacataggattccagaacactgctgccattgtctgaatgtttgtcccccacataggattccagaagcctgctgctggggtctgaatgtttgtcccccatctaggattccagaacactgctgcgagggtctgaatgtctgtccctcacatatgattctagaacattgatgctagggtctgtatgtttgcccttaacatatgatttcaaaacactgctcctggattctgaatgtttgaccttcacataggaatacagaacactgctgctggagtctgaatggttgtcactcacatagaattccagaacactgctgtgaggatctgaatgcttgaccctcacatgggattccagaacactgttgcgagggtctaaatgtctgtccctcacacaggtttcccgaacaatgttacgaggttctgaatgtttgtccctaacataggattccagagcactcctgctgtgctctgaatgcttctccctcacataggattccagaacactgctacgagggtctgaatgcttatccctcatataggattccagaacacttctgctgtggtctgaatgtttgctcctcacataggattccagaatactcctgccgtggtctgaatgtttgtccctcacataggattccagaacattcatgctggggtctcagtgtttcccttaacataggatttcagaacactgctcttggggtctgaatgtttgtcgctcacataggattacagaacactgctgctggagtctgaatgtttgtcagtcacagagaattccagaacactgctacaagggtgtgaatatttctccctcacctagtattccagaacactgttgcaagggtctgaatgttggtccgtcatataggattccagaacactgatgctgtggtctgaatgtttgtctctcacatagaattccggaacactgctacaagggtctgaatgtttgtccttcacataccattccagaacactgctgccgtggtctgaatgtatgtccctcacataggattccagaacactgctactaggttctgaatgtttttcccacacctaggattccagaacacttctgctggtgtctgaatggttgttcctcacgtatgattccaggacacggctatgagagtcttaatgtttgtccttcacataggattctagaacactgctcccgtggtctgaatgtttgtccttcacatagcattccagaacactgctgctggggtctgaatgtctgcccctcaaatcagattccagagcactgctgctggggtttgaatgtctttccctcacatagaattccagaacacggctgggagggtctgaatgtttgtccctcacatgggataccagaacactgctgcgagggtctaaatgtctctccctcacataagatttcaggacactgctacgaggttctgaatgtttgtccctcacaaaggattccagagcactcctgctgtggtctgaatatttgtccctcacataggattccagaacactgctgctggggtctgaatgcttgtccctcacatacgattacagaacactgttggtgaggagtgaatgtttgtccctcacataggataccagaccactgctgttggggtctcaatgtctgtccctcaaaaaggattccagaacactgttacgagggtctgaatttttgtccctcacttaagactgcagaacactgcttcgagggtctaaatgtctgtccttcacataggattccagaacactgctacgagggtctgaatgtttgtccttcacatagcatttcagaactgccatggtctgaatggttgtccctcacatagtattccagaacactgctatgagggtctgaatgtttgtacctcacataggattccagaacactgctacgagggtctgaaagtttgtccctcacataggattccagaagactgctgctggggtctgaatgtctgtccctcacatcggattccagaacactgctgctggggtttgaatgtatgtccctcacatagaattccagaagactgctgggagagtctgaatgtttgtccctcacataggattccagaacactgctatgagggtctgaatgtttgtccttcacataggattccagaacactccttctggggtctgaatgtttgtccttcacataggattccagagcactcctgctgtggtctcaatgtttgttaatcacataggattccagaacactgctacaaggatctgaatgtttgtccctcacataggattccagaatactcctgctatggtctcaatgcttgtccctcacataggattccagaacattcatgttggggtctgaatgtttgcccttatcataggatttcagaacagtgctcctggggtctgaatgtttgtccttcatataggatttaagaacactcctgttttggtctgaaagtttgtccctcacataggattccagaactctcttgctgtggtctgaaagtttgtccttcacataggattccagaacactgctgctgtggtttgaatgtttgtccctcacataagattccagaacactgctacgagggtctgaatgtttgtccctcacataggattcctgagcattgttgccgtggtctgaatttttgccactcacataggattccagaacagtgctacgagggtctgaatgtttgtccctcacataggattccagaaaacttctgctggtatctgaatgtttgtacctcacataggattccagaacactgctgctggggtctgaacgtctgtccctcacataggattctagaacactgctgttggggtttgaatgtccctcacatagaattccagaacactgctgcgagtgtctgaatgtttgtcctgcagatgggattctagaacactgctgcgagggtctaaatgtctgtccctgacataacattccagcacactgctacgaggttttgaaatgtttgtccctcacataggattccagaacattcctgctgtggtctgattgttcctcacataggattccagaacactgctacgaggttctgaatttttgtccctcacataggattgcagaacactgctacaagggtttgaaagtttttccctcacataggattccacaacactactgctggggtctgaatgtttgtccctcacataggattctggaacactccagctggcttctgagtgtttgtccctcacataggattcctgaagactgctgctgtcactatagtcgttgcgagtgtctgaatgtttgtccttca

SEQ ID NO: 3446 - DNA, 7612 bp, Homo sapiens
  source 1..7612: mol_type = other DNA
cactcacataggattccagaacactgctacaaggctctgagtgtttgtccctcacgtaggattccagaacactgctgccattgtctgaatgtttgtcccccacataggattccagaagcctgctgctggggtctgaatgtttgtcccccatctaggattccagaacactgttgcgagggtctgaatgtctgtccctcacatatgattctagaacattgatgctagggtctgtatgtttgcccttaacatatgatttcaaaacactgctcctggattctgaatgtttgtccttcacataggaatacagaactctgctgctggagtctgaatggttgtcactcacatagaattccagaacactgctgtgaggatctgaatgcttgaccctcacatgggattccagaacactgttgcgagggtctaaatgtctgtccctcacacaggtttcccgaacaatgttacgaggttctgaatgtttgtccctaacgtaggattccagagcactcctgctgtgctctgaatgcttctccctcacataggattccagaacactgctacgagggtctgaatgcttatccctcatataggattccagaacacttctgctgtggtctgaatgtttgctcctcacataggattccagaatactcctgccgtggtctgaatgtttgtccctcacataggattccagaacattcatgctggggtctcaatgtttcccttaacataggatttcagaacactgctcttggggtctgaatgtttgtcactcacataggattacagaacactgttgctggagtctgaatgtttgtcagtcacatagaattccagaacactgctacaagggtgtgaatatttctccctcacctagtattccagaacactgttgcaagggtctgaatgttggtccgtcatataggattccagaacactgatgctgtggtctgaatgtttgtccctcacatagaattccggaacactgctacaagggtctgaatgtttgtccttcacataccattccagaacactgctgccgtggtctgaatgtatgtccctcacataggattccagaacactgctactaggttctgaatgtttttcccacacctaggattccagaacacttctgctggtgtctgaatggttgttcctcagatatgattccaggacactgctatgagagtcttaatgtttgtccttcacgtaggattctagaacactgctcccgtggtctgaatgtttgtccttcacatagcattccagaacactgctgctggggtctgaatgtctgcctctcaaatcagattccagaacactgctgctggggtttgaatgtctttccctcacatagaattccagaacatggctgggagggtctgaatgtttgtccctcacatgggataccagaacactgctgcgagggtttaaatgtctctccctcacataagatttcaggacactgctgcgaggttctgaatgtttgtccctcacataggattccacagcactcctgctgtggtctgaatatttgtccctcacataggattccagaacactgccacgtgggtctgaatgtttgccctcacataggattccagaacactcctgctgtggtctgaatgtttgaccctcacataggattccagaacactcctgctgtggtctgaaagtttgctcaccacataggactccagaacactgctaagagggtatgaatgtccctcacattgtattccagagcactccttctgtggtctgaatgtttgttcctcacataggattcgagaacactcctgctgtggtctgaatgtttgtcccttacctaggattcgagaacattcacactgggatgtaaatgcttgcccttaacataggatttcagaacactgctcctggggtctgaaagtttgtccctcacataggattccagaactctcctgctgtggtctgaaagtttgttcatcacataggactccagaacactgctaagagggtatgaatgtccctcacatagtattccagaacactccttctgtggtctgaatatttgttcctcacataggattcgagaacactcctgctgtggtctgaatgtttgtccgttacctaggatttgagaacattcatgctgggatgtaaatgcttgcccttaacataggatttcagaacactgctcctggggtctgaaagtttgtccctcacataggatcccagaactctcctgctgtggtctgaaagtttgtaccgcacataggattccagagcactgctgctgtggtcgggatgtttttctgtcacataggatttcagaacactgcggctgggttctgaatgtttctccctcacataggatttcagaacactgctacgagggtctgattgttggtccctcacataggattcctgaacactgctgctggtctctgaatgtttgtccctcacattggattgcagaacactgctgctatggtctgaacgtttgtccgtcacataggattccagaacgttcctgctgtggtctgaatgtttgtctgtcacataggattccagaacactgcggctggggtctgaatgtccctgacataggattccagaacattgctatgagggtctgaatggttgtctttcacatagcattccagaacactgctacgagggtctgaatgttggtccctcacacaggattccagaaccctcctgctggggtctgaatgtttgtccctcacaaaggattccagaacactgcaatgagggtctgaatatttgtccctcacataggattccagaacacacctgctgtggtctgaatggttgtacctcacaaaggattccagaacactcctgctgtgatctgaatggttgtccctcacataagattccggaacacttctgctgtggtacgaatgtttgtgtctcacgtaggattccagaacactgctacgagggtctcaatgtttgtccctcacataagattccagaacactgctgctggggtctgaatgcttgtccctcacatacgattacagaacactgttggtgaggagtgaatgtttgtccctcacataggataccagaccactgctgttggggtctcaatgtctgtccctcaaaaagcattccagaacactgttacgagggtctgaatttttgtccctcacttaagactgcagaacactgcttcgagggtctaaatgtctgtccttcacataggattccagaacactgctacgagggtctgaatgtttgtccttcacatagcatttcagaactgccatggtctgaatggttgtccctcacatagtattccagaacactgctatgagggtctgaatgtttgtacctcatataggattccagaacactgctatgagggtctgaatgcttatccctcatataggattccagaacacttctgctgtggtctgaatgtttgctcctcacataggattccagaatactcctgccgtggtctgaatgtttgtccctcacataggattccagaacattcatgctggggtctcaatgtttcccttaacataggatttcagaacactgctcttggggtctgaatgtttgtcactcacataggattacagaacactgttgctggagtctgaatgtttgtcagtcacatagaattccagaacactgctacaagggtgtgaatatttctccctcacctagtattccagaacactgttgcaagggtctgaatgttggtccgtcatataggattccagaacactgatgctgtggtctgaatgtttgtccctcacatagaattccggaacactgctacaagggtctgaatgtttgtccttcacataccattccagaacactgctgccgtggtctgaatgtatgtccctcacataggattccagaacactgctactaggttctgaatgtttttcccacacctaggattccagaacacttctgctggtgtctgaatggttgttcctcagatatgattccaggacactgctatgagagtcttaatgtttgtccttcacgtaggattctagaacactgctcccgtggtctgaatgtttgtccttcacatagcattccagaacactgctgctggggtctgaatgtctgcctctcaaatcagattccagaacactgctgctggggtttgaatgtctttccctcacatagaattccagaacatggctgggagggtctgaatgtttgtccctcacatgggataccagaacactgctgcgagggtttaaatgtctctccctcacataagatttcaggacactgctgcgaggttctgaatgtttgtccctcacataggattccacagcactcctgctgtggtctgaatatttgtccctcacataggattccagaacactgccacgtgggtctgaatgtttgccctcacataggattccagaacactcctgctgtggtctgaatgtttgaccctcacataggattccagaacactcctgctgtggtctgaaagtttgctcaccacataggactccagaacactgctaagagggtatgaatgtccctcacattgtattccagagcactccttctgtggtctgaatgtttgttcctcacataggattcgagaacactcctgctgtggtctgaatgtttgtcccttacctaggattcgagaacattcacactgggatgtaaatgcttgcccttaacataggatttcagaacactgctcctggggtctgaaagtttgtccctcacataggattccagaactctcctgctgtggtctgaaagtttgttcatcacataggactccagaacactgctaagagggtatgaatgtccctcacatagtattccagaacactccttctgtggtctgaatatttgttcctcacataggattcgagaacactcctgctgtggtctgaatgtttgtccgttacctaggatttgagaacattcatgctgggatgtaaatgcttgcccttaacataggatttcagaacactgctcctggggtctgaaagtttgtccctcacataggatcccagaactctcctgctgtggtctgaaagtttgtaccgcacataggattccagagcactgctgctgtggtcgggatgtttttctgtcacataggatttcagaacactgcggctgggttctgaatgtttctccctcacataggatttcagaacactgctacgagggtctgattgttggtccctcacataggattcctgaacactgctgctggtctctgaatgtttgtccctcacattggattgcagaacactgctgctatggtctgaacgtttgtccgtcacataggattccagaacgttcctgctgtggtctgaatgtttgtctgtcacataggattccagaacactgcggctggggtctgaatgtccctgacataggattccagaacattgctatgagggtctgaatggttgtctttcacatagcattccagaacactgctacgagggtctgaatgttggtccctcacacaggattccagaaccctcctgctggggtctgaatgtttgtccctcacaaaggattccagaacactgcaatgagggtctgaatatttgtccctcacataggattccagaacacacctgctgtggtctgaatggttgtacctcacaaaggattccagaacactcctgctgtgatctgaatggttgtccctcacataagattccggaacacttctgctgtggtacgaatgtttgtgtctcacgtaggattccagaacactgctacgagggtctcaatgtttgtccctcacataagattccagaacactgctgctggggtctgaatgcttgtccctcacatacgattacagaacactgttggtgaggagtgaatgtttgtccctcacataggataccagaccactgctgttggggtctcaatgtctgtccctcaaaaagcattccagaacactgttacgagggtctgaatttttgtccctcacttaagactgcagaacactgcttcgagggtctaaatgtctgtccttcacataggattccagaacactgctacgagggtctgaatgtttgtccttcacatagcatttcagaactgccatggtctgaatggttgtccctcacatagtattccagaacactgctatgagggtctgaatgtttgtacctcatataggattccagaacactgctatgagggtctgaaagtttgtccctcacataggattccagaagactgctgctggggtctgaatgtctgtacctcacatcggattccagaacactgctgctggggtttcaatgtctgtccctcacatagaattccagaagactgctgggagagtctgaatgtttgtccctcacataggattccagaacactgctatgagggtctgaatgtttgtccttcacataggattccagaacactccttctggggtctgaatgtttgtccctcacataggattccagagcactcctgctgtggtctcaatgtttgttaatcacataggattccagaacactgctacaagggtctgaatgtttgtccctcacataggattccagaatactcctgctatggtctcaatgcttgtccctcacataggattccagaacattcatgttggggtctgaatgtttgcccttatcataggatttcagaacagtgctcctggggtctgaatgtttgtccttcatataggattaaagaacactcctgttttggtctgaaagtttgtccctcacataggattccagaactctcctgctgtggtctgaaagtttgtccttcacataggattccagaacactgctgctgtggtttgaatgtttgtccctcacataagattccagaacactgctactagggtctgaatgtttgtccctcacataggattcctgagcattgttgccgtggtctgaatttttgccactcacataggattccagaacagtgctacgagggtctgaatgtttgtccctcacataggattccagaacacttctgctggtatctgaatgtttgtacctcacataggattccagaacactgctgctggggtctgaacgtctgtccctcacataggattctagaacactgctgttggggtttgaatgtccctcacatagaattccagaacactgctgcgagtgtctaaatgtttgtcctgcagatgggattctagaacactgctgcgagggtctaaatgtctgtccctgacataacattccagcacactgctacgaggttttgaaatgtttgcccctcacataggattccagaacactcctgctgtggtctgaatgtttgcccctcacataggattccagaacattcctgccgtggtctgattgttcctcacataggattccagaacactgctacgaggttctgaatttttgtccctcacataggattgcagaacactgctacaagggtttgaaagtttttccctcacaaaggattccacaacactactgctggggtctgaatgtttgtccctcacataggattctggaatactccagctggcttctgagtgtttgtccctcacataggattcctgaagactgctgctgtcactatagtcgttgtgagtgtctgagtgtttgtccttcac

SEQ ID NO: 3447 - DNA, 273 bp, Homo sapiens
  source 1..273: mol_type = other DNA
aaaagtcagtgcagagagtgaaaacaacatggcatttggaatcaagtacatccaggtttgagtcatgcctgaattccaatcccaactctgctacttactatatgatgttgagcaagtttcttaacttctctgatcttcagtttcttaatgggtaaaacttggataataccacctacttgcagggttgtggtgagaattggggatataaacatgcaatgcctaggacaatgcctaggatgtagaagatgctcaataaagatagttatcattatt

SEQ ID NO: 3448 - DNA, 31 bp, Homo sapiens
  source 1..31: mol_type = other DNA
gaatccacctccgagttgtgacaattaaatg

SEQ ID NO: 3449 - DNA, 412 bp, Homo sapiens
  source 1..412: mol_type = other DNA
gttagggacaggctgccccaggaccactccgcccccgctaactcaatgcagctgacccttaccctgaatactctgcagctgcattcctgaaccgttatctaggcgctatagcaaggtcaccagacttgctacaccgaagccctctgggtggcacgggggaggtcatgagaaacgtggattacacccccttgtaaattcctattttcacaagataatatattgtaagccggtcatgagattatatgtggtaaagttaattgactaacaaccccagggtctctctcccccatataaacccctcattttgtaagctcagggctgccacctccgactggtggagaagcctggcaggttaataaacttacttggcctgaccttgggtctcttgtcttttctctcggctaaccttaca

SEQ ID NO: 3450 - DNA, 30 bp, Homo sapiens
  source 1..30: mol_type = other DNA
gactcccagctatatttctccagacttgca

SEQ ID NO: 3451 - DNA, 289 bp, Homo sapiens
  source 1..289: mol_type = other DNA
caggcacagtggctcatgtctgtaaccctagcactttgggaggctgagataggagaattactagggttcaggagtttgagacgaacctgggtgacatagtgagagctcatctctacaaaaaataaaattagctcggcatggtgctgcaagattatagtccctgttagtcgagaggctgaggtgggagaactgcttgagcccaggagggaaagcagcagtgaactgagatcacgccactgcactccagcctgggcgacagtgagaccctgtctcaaaaaaaaaaaaaaaa

SEQ ID NO: 3452 - DNA, 246 bp, Homo sapiens
  source 1..246: mol_type = other DNA
ctagacttgtactttcaactgtccatttctccctgtctgtcccatgggcactcatgaaaaaacagaatgctcccaactttattcatcttccaagcctgtagctcttggtatactcactgttgcaagtcagaagcttgatttcatcattgatgtttttctcacgtttcacatctcactcatcaccaagtcatgttggtgttaatttctgattaacccttgaatttaccgtcttctcatcctctgtac

SEQ ID NO: 3453 - DNA, 139 bp, Homo sapiens
  source 1..139: mol_type = other DNA
ttcttaatctataaaccatggataggcttcgggagaacccaagaaccaatgaaatctgttggtaagttttatgtgtgcggttttctacagagagggtcaacagcatgtatattttcaaagaagtctgtggtgcaaaaga

SEQ ID NO: 3454 - DNA, 298 bp, Homo sapiens
  source 1..298: mol_type = other DNA
ctgggcacagtggctcacacctacgatcacagcacttcgggaggctgaagcaagcagatcacttgaggtcaggagtttgagaccagcctggccaacatggtgaaaccctgtctctactaaaaatacaaaaagtagccagccgtgatgacaggcacctgtaatcccagctactcgggaggctgaggcatgagaattgcttgaacccgggaggcggaggttgcagtgagcctagatcatgccactgcactccaacctgggcagcagagcaagactctgtctcaaaaggggaaaaaaaaaa

SEQ ID NO: 3455 - DNA, 114 bp, Homo sapiens
  source 1..114: mol_type = other DNA
accagctgggcaacattcagaaagttagtcttcctatgctcattttcctgggctgttacagaagaagactggaagaggtaatttccaaggttcttcccagctctgaagttgtgt

SEQ ID NO: 3456 - DNA, 1550 bp, Homo sapiens
  source 1..1550: mol_type = other DNA
gtaaattggtaccaggagtggggcattgctgaaaagatacctgaaaatatggaagcaactttggaactaggtaacaggcagagactggaacagtttggaaggctcagaagaaagcaggaaaatgtaggaaagtttggaaccacctagtgacttgttgaatggctttgacaaaaatgctgatagtgatataagcaataaggtccaggctgaggtggtctcagatggagatgaggaacttgggaactggagcaaaagtgactcttgttatgttttagcaaagaaactggcagcattttgcccctgccctagagatttgtggaactttgaacttagatgatttagggtgtctggtggaagaaatttctaagcagcaaagcattcaagaggtgacttgggtgctgttgaaggcattcagtttcaaaggggaaagagagcataaaagtttggaaaatttgcagcctgacaatgcaatagaaaaaaaaatccatattttgaggagaaattcaaaccagctgcagaaatttgcataagttaacgaggagccgaatgttaatcaccaagacaatgaggaaaatgtctgcagggcacaccagagacctttgcagcagcccctcccatcacaggcctgaaggcataggtagaaaaagtggtttcctgggccaggcccaggttcctggtgctgtgtgcagcctagggacttgatgccctgcttcccagacactgactaaaagggtccaatgtagagcttaggctgtggctgcagagggtgcaagactcaagccttggcagcttccatgtggtgttaagcctatgactgtacagcaatcaagaattaaggtttgggaagctctacgtagatttcacaggatttatggaaacacctggatgcccaggcagaagtttgctgtaggggcagggtcctcatgtagaacctctgctagggcattgcagaagggaagtgttgggtgggaggccccacacagagtccctactggggcaccacctagtggagctgtgagaagaggaccaccatcctccagactccagaatggtagatacactgacagcttgcaccgtgtgcctggaaaagctgcactcaatgccagcttgtgaaggcagctgggagggaggctgtaccctgaaaagccacaggggtggagctgccccagaccatgagaacacatctcttccatcagcgtgacctgaatgtaagacatggagtcaaaggagatcattttgtagctctaacatttgactgtcctgccggattttcacatggggcctgtagcccctttgttttggtgaatttctccatttggaatgggtgtatttatccaatgcctgtattcccattgcatctaggaagtaactagcttgcttttgattttacaggctcatatgcagaagggttttgccttgtctcagatgagactttggactgtggacttttgagtcactgctaaaattagttgagactttaggtgactcttggaaaggcatgattggttttgaaatgtgaagatgtaagattttggagggactggggtgga

SEQ ID NO: 3457 - DNA, 1790 bp, Homo sapiens
  source 1..1790: mol_type = other DNA
atacctcactttattgtgcatcactttattccacttcacagataccatgatttttgcaaattgaagatttgggacaatccttcattgaacaagtcttttggtgccaaacaagtcttttggtgccatctttccagtggcatatacacactttatgtccgtgtgtcacattttggtaattactacaatatttcaaactttaaaattattatatctattagagtgatctgtgatcagttatctttgatgttactactgttattactctggggcatgatgagctgtgcccataaaacacagcagtgaacctattcgataaatgtatgcatgtcctggctgctccttgagccggctgttttgtgtcatctgtctcccttcttttcccccctctgtgccctgaaacacaacaatttttaaattacaccaattaataaccctacaatgacctctaagtgttgaagtgaaaggaagaattgcacctcacttgaaatcaaaagctagaaatgattaagcttagtgaggaaggcatgtcaaaggtgagacaggctgaaagctaggacttttgtcccagttggtcagcttttgaatacacaggaaaagttcttgaagaaaattaaaagtgctgctccagggaacacatgaatgataagaaagcaaaacagcctttttgctgacatgaagaaaatttcagtggtttggatagaaaatcaaggcagccacagtattcccttaagccaaagcctaatccaggggaaggccctcactctcttcagttctgtgaaggctgagagatgtgaagcagctgtagaagaaaagtttgaaactagcagataatggttcatgtggtttaaggaaagaagccatctccataacataaaagtacaaggtgaagtagcaagtgctgatgtagaagctgtagcaagttatccaggagatctagctaagatcattgatgaaggtggctacacaaaacaaaagattttcaatgtggacaacaacctgctattggaagaagatgccatctaagactttcatagctagagaggaaatttcagtgcctggcttcaaagcttcagaggacaagctgactttctcattaggggctaatgcagctgatgtctttaagttaagccagtgctcacttatcattcccaagattttagggcccttaggaattatgctaaatctactgtgcctgtgctatataaatggaacaacaaagcctggatgacagcacatctgtttactgagtattttaagcccactgttgagacctactgctcagaaaaaaaaaagaaaaagaaaaagaaaaagaagaaaaaatccttttgaaatactgacaatgcacccagtcgcccaagagctgtgatggagatgtgtaagaagattcatcttgtttttatgcttgctaatgcaacatccattctgcagcccaaggatcaattgaagtgcagtaatttcaatttccaaatgtaattatttaagaaatgtaattcataaggctatacctgtgatagacagtaattcctctgatggattcaggcaaagtaaattgaaaaccttctagaaaggatttaccattctagatgccactaaggaaattttggattcatggggaaatatcaaaatgttagcattaacaggagtttggaagaagttgagtccaaccctcatggatgactttgagtgactcaagacttcagtggaggaagtaactgcaaatggggtagaaatagcaagagaattagaattaccaatggagatggaagatgttactgaattgctacagtctc

SEQ ID NO: 3458 - DNA, 113 bp, Homo sapiens
  source 1..113: mol_type = other DNA
gctgggtgcagtggcgaccccgtagtcccagctactggggaggctgaggtggaaggatcacttgagcccaggagtttccgaacagtctgggcaacataccaagaccctgtctc

SEQ ID NO: 3459 - DNA, 1806 bp, Homo sapiens
  source 1..1806: mol_type = other DNA
gaacactcccatttacaatagacacacacacacacacactacctaggagtacatctcacgaaggaggtgaaagatctctgcaagaaggacgataaaatcatggataacacaaactaatggaaaaatatttcatgttcatggactggaagaattgatatcattacaatggccatacagcccaaagcagtctacatattcaacactgttcccatcaaactactaatgtcatttttcacagaactggaaaaaaaaaaaaactattacaaaattcgtgtggaaccaaaaaacagccagagtagccgaagcaatccaaagcaaaaagaacaaaactagtggtttcgtgttacctgacttcaaactatactgtaaggctacagtaaccaaaacagcatggtactggtacaaaaacagatatgtagaccaatggaacggaatagagaacccagaaataaaggtgtacacctgtagccatcgaatcttcaacaaagttgacaaaaataagcaacaggaaaaggactccctattcaataaatggtcctggaatagcttactagccatatgcagaggaatgaaaatggacccctacctttcagcatatataaaaattgacccaacatggattatagatacttaaatgtaagacctcaaactataaaaaccctaggaaaaaaacttggaaacaccattctggccttaggaaagaatttgtgactaagtcctcaaaagcaattgcaacaaaaacgaacattgacaaatgagatctaattaagccaaagagcttatgtacagcaaaagaaattatcaatagagtaaacggtgtacagtattaatagatacaccatttcatatacagaccacctacagaataggagaaaatatttgcaaactgtgcatctgacacaggtccaatatccagaatctattggaaacttaaacagttcaacaagaaaaaaaagaccccactaaaaagtgggcaaaagacatgaacagacaattttcaaaagaagacatacaagcagccaacaaatgtataaaaaaagttccacatcgctgattatcagagaaatgcaaatcaaaaccacaatgagttaacatctcacaacagtcagaatggctgtcattagaagttaaaaaacagatgctaatgaggctgcagagaaaagggaacactcatgcactgttggtgggaatctaaattagttcagccactgtggaaagcagtttggagatttctcaaagaacttaaaacagaactaccatttgacccagcaatcccattactagctacatctcagaaaagaaattattctaccaaaaagacacatgtactcatatgttcatcacggcactattcacactagcaaagatacggaatcaacctaggtgcccatcaacagtggattgcataaataaaatgtggtacatatataccatggaatactatgcagccattaaaaaaagaatgaaaccatgtcctttgcagcaacgtggatgcagctggaggataatatcctaagtgaattaacgtaggaacagaaaataaaatactgtgtgttctcacttagaagtgggagttaaacatcagttacttgtggatgtaaaggtgacagcactaaacactgaagactgctatagtgatgagggagggaggcagtaggtgttgaaaaaactaactgttgggtactgtactcagtacctgggcaatggaataattcataccccaaacctcagcatcatgcaacatacccaggtaacaaacttgcacacgtaccccctgaatctaaaataaaagttaaaaagaaaaaa

SEQ ID NO: 3460 - DNA, 628 bp, Homo sapiens
  source 1..628: mol_type = other DNA
tgtcagaggcatttgaaccagagtcactccatcttgaatgggggctgggtaaaataaggttgagacctactgggctgcattcctgagagattaggcattcttactcacaggatgagacaggaagtcggcactaagtacaggtcacaaagaccttgctgataaaaagaagtggtaaagaagccggccaaaaccagccaaaacccaccaaaaccaagatggtaacaaaaatgacctcgggtcatcctcactgctcatgcattagcatgctaaaagacactcccactagcgccatgacagtttacaaatgccatggcaacatcaggaagtcaccctatatggtctaaaaaggggaggaaccctcagttctgggaattgcccactcctttcccagaaaactgctaaacaaggagtaatcaatcccttgtttagcatatactcaagaagtaacaagtacaagcagctgagcagccaaagccactgctctgcctatggagtaggcattctttattcctttgctttcttgatgaacttgctttcactttactctatggactcgccccgaactctttgttgcgtgagatccaagaaccctcttttggggtctggatcaggacccctttctggtaac

SEQ ID NO: 3461 - DNA, 42 bp, Homo sapiens
  source 1..42: mol_type = other DNA
gcccccaactttcaaaaaagaaagtcatgcctcctactcatc

SEQ ID NO: 3462 - DNA, 292 bp, Homo sapiens
  source 1..292: mol_type = other DNA
aatggtttaggacaaccccccaagtgctgtcttgtcatggagttttcagaagatctggttgtttaaaagtgtgtagcagctcccctccaccttcctcctattctggtcaggtaggacatattggcttcccattcaccttctcagaattataagttttctgaggcctcctcagccatggcacctataaaacctgggaaactgtgagtaatttaaacctcttttcttcataaattacccagtctcaggtagttctttacagcaatatggaacaaatgtgagaacaaagtaatac

SEQ ID NO: 3463 - DNA, 2204 bp, Homo sapiens
  source 1..2204: mol_type = other DNA
tctcaacaaactaggtattgatgagatgtatctcaaaataatagctatttatgacaaacccaaagccaatatcgtactgaatgggaaaaaactggaagcattccctttgaaaactggcacaagacagggatgccctctctcaccactcctattcaacattgtgttggaagttctggccagggcaatcaggcaggaggaataaataaagggtattctattaagaaaacaggaagtcaaattgtcccttttgcagatgacatgattgcaaagttagaaaaccacatcatttcagctcagaatctccttaagctgataaacaacttcagcaaagtctcaagatacaaaatcaatggcaaaaatcacaagcattcatatacacaaagaacagacaaacagagagtcaaatcatgagtgaactcccattcacaattgcttcaaagagaataaaatacctaggaatccaacttacaagggatgtgaaggacctcttcaaggagaactacaaaccactgctcaatgaaataaaagaggacacaaatggaagaacagtccgtgctcatgaatatgaagaatcaatattgtgaaaatggccatactgtccaaagtaatttacagattcaatgccatccccatcaagctaccaatgactttcttcacagaattggaaaaaactactttaaagttcacatggaagcaaaaaagagccggcattgccaagacaatcctaagccaaaagaacaaagctggaggcatcacactgcctgacttcaaactatactacaaggctactgtagtaaccaaaacaacatggtactggtaccaaaacagagataaagaccagtagaacagaacaaaaccccagaagtaataccacatatctacaaccatctgatctttggcaagcctgacaaaaacaagaaatggggaaaggattccctatttaataaatggtgctgggaaaactggctagccatatgtagaaagctgaaacaggatcccttccttacatctcatacaaaaattaactcaaggtggattaaagacttaaatgttagaactaaaaccatcaaaaccctagaagaaaacctaggcaataccaataaggacataggcatgggcaaggacttcatgactaaaacaccaaaagcaatggcaacaaaagccaacattgacaaatgggatctaattaaactaaacagcttctgtgcagcaaaagaaactaccatcagagtgaacaggcaactgacagaatgggagaaaattttcacaatctacccatctgccaaagggctagtatccagaatctccaaagaacttaaacaaatttacaagaagaaatcaaaccaccccatcaaaaagtgggcagaggacacttgaacagacacttctcaaaagaagacatttatgcagccaacagacacatgaaaaaatgttcatcatcactggccatcagagaaatgcaaatcaaaaaccacaatgagataccatctcacaacagttagaaaggcaatcattaaagtcaggaaacaacaggtgctggagaggatgtggagaaataggaatgctttcacactattggtgggactgtaaactagttcaaccattgtggaagacagtgtggcaattcctcagggatctacaactagaaataccattttacccagccatcccattactgggtatatacccaaaggattataaatcatgctgctttaaagacacatgcaaacttatgtttattgtggcactattcacaatagcaaagacttggaaccaactcaaatgttcatcaatgatagagtgggttaagaaaatgtggcacatatacaccatgtaatactatgcagccataaaaaaatgagttcatgtcatttgcagggacatggatgaagctggaaaacaccattctgagcaaactatcgcaagaacagaaaaccgaacaattcatgttctcacacataggtgggaattgaacaaggagaacacttggacacagggaccatcacacactggagcctgtagttagtggagtggggggaggggggagtggtagcattaagagatatacctaatgtaaatgtggagttaatgggtgcagctaacaggtgcagcacaccaacatggtacatatatacatatgtaacaaacctgcacgttgtgcacatgtaccctagaacttaaagtataataaaaaaattaaaaaa

SEQ ID NO: 3464 - DNA, 900 bp, Homo sapiens
  source 1..900: mol_type = other DNA
cctcaggtttcacctgtctaccttcaggcatttttttcatctgttataacacagactatcatgcctaaatgacactctgaaagaactatgctttctctcctttctagcacctcccatgtccatatatatggaacaagagttaaaaagtctccttatatcccaatctcaccacaggcaagcccttagtgtcccttttactataggagcaggaatactaggcaggcttgggactggaattggaggcataacctcctccacccaattctattataaattatcacgagaattaaatgatgacatggaatgagttgccaactctctagtgaccctataaagccagcttaattatctaactgtggtagtccttcaaaattggagagccctagacttattaactgccaaaagaggaggaacctgcctcttcttaggagaagaatgttgctatttcattaaccagtcaggaatcattactgaaaaggtcaaagaaataagagaacgaatagaaagtagaaaaaaggagcttgaacactcagggccctgaaatatgtttaaccaatggataccttggatcctcccatttgcaggcctgcaacagccatccaactattattcgcttttgggctttgcatttttaacctccttgtcaaatttgtttcctccaggatcaaggccatcaagctacagatgatcttacacatggaacctcacatgagctcaactcacgtttctaccaaggacccctggatccacccgctggtccctcactggcctaaaaagttctcctctggaagacaccacaactacaggtccccttctttgcccctaaccagcaggaagtagtcagaatgaccgccgcccagttcccaacagcagttggtgtgtcctatctagaggggggac

SEQ ID NO: 3465 - DNA, 434 bp, Homo sapiens
  source 1..434: mol_type = other DNA
accatttttgacaaaatggatgaacctagaagatattatgctaagtaaattaagcaagttcaagaaggacaaatattttatgattccacttatattaggtaagtaaaataggcaaactaattgaagcagacaataaaatagtgttttccaggggtttgggagagagagaaattgggagttgttgctcagcgggtataaagtttcacttatgcttatgaataagcatagtgatttcctctgcaatataatgcctatggttaacaacgtggtattgtgcacttaataatgtgctaagagggtaaatcgcaagcattattaccatcaaaatcaaagactgacaaagagagcttttgtaggtaatggatatgtttattaccttcactgttataatgacagcatcatgggtgcacgtatatgtccaaactcaacaattc

SEQ ID NO: 3466 - DNA, 900 bp, Homo sapiens
  source 1..900: mol_type = other DNA
cctcaggtttcacctgtctaccttcaggcatttttttcatctgttataacactgcctatcatgcctaaatggcactccgaaagaactgtgctttctctcctttctagcacctcccatgtccatatatactgaacaagagttacaaagtctccttataacccaatcttgccacacacaagcccttagtgtcccttttactataggagccagaatactaggcaggcttgggactggaattggaggcataaccacctccaccccattctattataaattatcatgagaattaaatgatcacatggaatgagttgccaactctctagtgaccctataaagccagcttaattctctagctgtggtagtccttcaaaattggagagccctagacttattaacagctgaaagaggaggaacctgcctcttcttaggagaagaatgttgctatttcgttaaccagtcaggaatcattactgaaaaggtcaaagaaataagagaacgaatagaaagtagaaaaaaggagcttgaacactcagggccctgaaatatgtttaaccaatgggtaccttggatcctcccctttgtaggcctgtgacagccatccaactattactcgcttttgggccttgcatttttaacctccttgtcaaatttgtttcctccaggatcgaggccatcaatctacagatgatcttacacatggaacctcaaatgagctcaactcatgcttctaccaaggacccctggatccacccgctggtccctcactagcctaaaaacttctcctctggaagacaccacaactacaggtccccttctttgcccctaaccagcaggaagtagccagaatgaccgccgccctgttcccaacagcggttggtgtgtcctgtctagaggggggac

SEQ ID NO: 3467 - DNA, 293 bp, Homo sapiens
  source 1..293: mol_type = other DNA
gtgcatgcattatgtgtcacccagattttccctttgggaatatataaattactttccagctgatgaagtgactgacaactgacatacatcacctataagcgctctctctcagtacagcgctgctgaaagctatctagtataaagtgacctttccaagacagcccatatccaatgcctggacatatgtaagactttgaaggcccattctcctcatttcaatgtggaccaactctgaaaggctaacttgtcttcagaactcccagtgggtgagatgaaccctatgctgagactgc

SEQ ID NO: 3468 - DNA, 625 bp, Homo sapiens
  source 1..625: mol_type = other DNA
atgacatcagaagcaggatctgaagtggagcttctagagacccccaggagcttttagtgaacaagcaaagtacttgcagggcccacttgtgtccattgatctccagagtggctggggattgtggttaagctctctgggattttggaactccacagatttgtgttttgagttctccaagtttctttaaaaaaattcctgatccaaactgggtttggaaactgtgacagaaatggatttgatctgggaatttactggcttggatatacttagaggcctcttatatctgactggggcagaaaggaactagttaagcagttatatggcaggggttataaaatttggcttggaaaatttacagagatttttgtgttacaccctttgctttatttttcttgcatgcttaggtaggaaaaaaaccactggctaagttaatcaagagaattggagagtaaagccaatatttcagataaaaatgggatccttaagttctttcctgcttatacatgatgcctgggaagcagcaaagtcttccagaaatgacgaacccttactaaaggtaacttacagtggaatgttctgaatgaacaaaaatgccttgaagtacatttaaaaatgagggctctca

SEQ ID NO: 3469 - DNA, 1485 bp, Homo sapiens
  source 1..1485: mol_type = other DNA
gatgacagctctcagcccgtacgacacagccactgctggagttgggaagtactgctgaggctgcatgctccacggactcagtaggaaacaggaacaggcaggagccccatccttttctgagttggcagggtggtagcaccgtgctcccagatgctgctgcagctgcccagctgtggctacagacttgggcatccctgtattcatgggggttcaggaagtccccctgctcctgaaagctcagaagtgccagctcccgctgcctggcttctccttactcccggaacccagtctggggtagagcaaagttgtgtccaagcctgggcactattgtgatgtggctggacatgtgcatgcttggggcaaggctgacacaccagccccatgacacctcagccccctccagactttgagcacagacgaacacaggaaggcagctaaatggggactgaggatggctcagcaccatcctgcaggtgcccctcggtattaacagcctgagtgccatagatgacttgttcatggcacaggagacagacagactcctgggcggtaagaggcagatccctgatgaagccccatcttcaagctaggggcaccctaaagcctaggggctgatatgtcagttgaagatgaaggctgctgctggaagtaagaaattatggtgccttttccatgcccactcatgttcagcccatggaccaatcggcaagcagttcctcccttctgagcccataaaaacctccagatacagtcagactctaacagacattgggatgaccagcctgtggaaaggagctacccacttagggtctcctgagagctattacgtcactcaatgaagctcttctctgctttgctcacccaccatttgactgtgtacctaattcttcctggacatgggacaagaactcaggaaccacctaatggtgggactgaaacatctgtaacacaaaccagcctgaaacatgttccctacttgtcatattgcaggtgacaagaaagaagagctgtagctctttggggagcccagacctaaggtctccccagccagggacgtgacaacctctttggggctctgcagttcctgatgtctccaagcttccaggtgccaccacattcccctcatccagatgtgggtgactgcagcagaagctgtgtgcagtacgtctggtccagctgcagcttcacacagaactggtacctgtgctggtgcctggagctgcccacctctctgcaacagccaacatgcctggctgtgcacagtggctggaccttgcactcattcttctacacatgcctcagtacttcatgcctagcttgatgttggcaggtgtgggatccaggctggtagcaagagccaagcgcagcctgctgggccaagtgggtagaatgagtccagcaggtgcaagcaatagttaggcagaaagtgccaccacacacagagggttctggctggtgaagcgatatcccgaggatctcatgaca

SEQ ID NO: 3470 - DNA, 1580 bp, Homo sapiens
  source 1..1580: mol_type = other DNA
cagtctggccaagcttgaggagcccttcagcccaccgctacacagtgggagcacctctctgggctggctgaggccagagctggctccctctgcttgcgcggaggtgtggagggagaagtgcgggtgggaacctgggctgggcagggcgcttgtgggccagcgcgagttcttggtgggcgccggctcgcggccccacacttggagctgctggtgccgcccgccctgggcagtgaggggcttagcaccggggccagcagctgtggagggtgcaccaggtgccccagcactgctggcctacccatgccgtgctccaattgtcacccttcagccgccttcccacggggcagggctcaggacctgcagtctgccatgcctgagcccctccccagggagcgccaccctctgcttcatggtgcccggtcccatccatggcccaaggtctgaggagtgtgggtgcacggcaggtactggcaggcagacctgccccgcgacctcccagcgggatccactaggcaaagtcagctgggttcctgagtggggtgggaacttggagaacttttatgtctagccggaggattgtaaatacaccaatcggcccgccctctttgtctagctcagggttcgtggatgcaccagtcagcactctgtatctagctaatctggtgggaacttatggaatttttatgtctagctggaggattgtaaatgcaccaatcagcactttgtgtttagctcaaggtttgtaaatgcaccagtcagtgctctgtgtctagctcaaggtttataaatgtaccaatcagtactctgtgtctagctaatctagtggggacttggagaacttttgtgtctagctgaaggattgtaaatgtaccaatcagcactctgtgtctagctcaaggtttgtaaatgcaccaatcagtcctctgtgtctagctaatctagtggggactaggagaacttttgtgtctagctaaaggattgtaaatgcaacaatcagccctctgtgtctagctcaaggtttgtaaacacaacaatcagcaccctgtcaaaatggaccaatcagctctgtgtaaaatggaccaatcagctctgtgtaaaatggaccaatcactgctctgtaaaatggaccaatcagcaggatgtcggtggggtcagataagggcataaaagcaggctgctgtagccagcattggcaacctgctcaggtcgccttccaccccgtggaaggtttttatttcgctctttgagataaatcttgctgctgctcactctttgggtctgtgccgcctttatgagctctaacactcactgtgaaggtctgcaccttcactcctgaggccagcgagaccactaacccacccagagggatgaacagctccggacaggaggaaccaacggatccagatgcgccgcctgaagagctgtaacactcaccaggaaggtctgcagtttcactcctgaagccagcgagaccataaactccggacacagcatctttaagaactggtaacactcaccgcgagggtccgcagcttcgttcttgaagtcagtgagaccaagaacccacaaattctggacac

SEQ ID NO: 3471 - DNA, 2239 bp, Homo sapiens
  source 1..2239: mol_type = other DNA
gctaggtacacaactccagtgacctgggagtctcactcccatctccaacagcagctgcagcaagacccgcccaaggagatgctgagctcgcacacacctatactacccccacctgatgggccttccctatccactctggtagcagaagacaaaggacatttaatcttgggagttctggggtcccatccactgtgggtatctcttcacactactacagctgatgctttctggaaagtgccatctcctggcaacaggccaagcagcacaaaaatgatcattaaaccaccaaagctaggaccctcacagagtccaatgcacctctgccacctccaatggaacaggcactggtatccacagctgagagactcatagatggttcacatcacaggactctgcagacaacccccagtaccagcccggagctgggtagactcactggctggctagacccagaagagagttaacaatcattgcagttgggctcacatgaaatcacatccacaggaaaagggggagagtactacatcatgagaacaccctgtaggacaaaaaaatctgaacagcaacctttggccctagaccttccctctgacatagcctacacaaatgagaaggaaccagaaaacaaaccctggtaatatgacaaaactaggctcttcaacacccccaaaaaatcacactagctcaccagcaatgggtccaaaccaataagaaattcctgatttacctgaaaaagaattcaggaggttaattattaaactaatcaaggaggcaccagagaaaggtgaagcccaatgcaaggaaatccaaaaatatgatacaagaattgaaggagaaatattcaaggaaatagacagcttaaagaaaaaacaatcaaaaattcaggaaacttttggcagactttaagaaatgtgaaatcctctggagagtctcagcaatagaactgaacaagtagaagaaagaaattcagagctcaaagacaaggtatttgaagtaacccaatccaacaaagacaaagaaaaaaagaataagaaaatatgaacaaagtctccaagaagtctgggattatgttaaacaaccaaacttaagaataatcagtgttcctgaggaggaagacaattctaaaagcttggaaaacatgtttgggggaataattgaggaagacttccctggccttgctagagacctagacatgcaaatacaagaagcataaagaacacccaggaaattcagtgcaaaaagattttcacctacacacattgtcatcaggttatccaaagttaagatgaaggaaagaatcttaagagctgtgagacagaaaaaccaggtaacctataaagtaaaacctatcaggttaacagcagatttttcagcagaaaccctacaagctagaatggatggggccctatcttcagcttcctcaaacaaaacaagtaccagccaacaattttgtagccagcaaaactaagcatcatatatgaaggaaaaattcagccattttcagacaaacaaatgctgagaatttgccattaccaagccactgtaagaactgctaaaaggagctgtaaatcttgaaacaaatcctggaatcacatcaaacagaacatctttaaagcataagtcagacagaacctataaaacaaaaatacaagtttaaaagcaaaaacaaaaaaaacaaaaataaccaaagtacacaggcaacaaagagcatgatgaatgcaatggtacctcacatttcaaaactaacattgactgtaattggcctaaatgctccaattaaaagatacagaacctcagaatggataagaactcaccaaccatctcctgccttcaagagactcacctaacacataaggactcatataaacttcaagtaaagtggtagaaaaagacatttcatgcaaatggacaccaaaagcaagcaggggtagctattcttatatcagacaaaacaaactttaaagtatgagaagttaaaagggacaaagaggatcattatataatggcaaaaggccttgaccagcaggaaaatatcacaattttaaacatatatgcacttaacactggagctcctaaatttataaaacaattattaatagacctaagcaatgagatagagagcaacacaatcatagtgggggacttcaatactccactgacagcactagacagatcatcaagacagatagtcaccaaggaagccatggatttaaactacaccttggaacaaatggactta

SEQ ID NO: 3472 - DNA, 2768 bp, Homo sapiens
  source 1..2768: mol_type = other DNA
caagtggtgagtagcatcagacccctttcacttgctattctgtcctatttttccttagaattcgggggctaaataccaggcacctgttggccagttaaaagcaactagcatgcctgctggactaaagacacgggtgtcaggctttctgggaaagtgttctctaacaatccccgactctcggagttgggagcattggtttccctggaaccagtttctgcttttcctgtacttctgggctgagccgagtgtcaatagagaggaaagccattcagctccggggtcccgacaacaagtcggttgaccctgcagccataagcgaaactctgaaagtcatgtcgcctaagtgagactcgcccatctatcctatctatcctgacccttgcctcctgggtcctaatgcctgtcagacaaacttcctcttgcctctcttctccgaggctagtcccacttctaaaaaccactccctgtttctggtgcttttctagttcctcctataagaatgatttctagtgtaaactcgaggactctattcccttctttaggcacccaggctcactaattggaaagacataatttttgcccaaagccccattgtagggggtattatctggaattttagggtccctcctcagacaagcaggcctaacaaaagctattcctgaagctaggatatggggagcctcagaaactgtattcttcctattcatataagtgaggaaaaaaggcgtcactcttccaaccctggagattccttccttccctcagggtatggccctccacttcattctggggacataacatctttataggatggggtaaagttccaatactaacaggagaatgcttaggactctaacaggttttcgagaatgtgtcggtaagggccactaaatctgatttttctcagtcctttttgtggtctaggaggacaggcatgggtgcaggtttttgagaatgtgttggtaaggactgctaaatccaacattcctcggtcctccttgtggtctaggaggaaaactagtgtttctgctgctgtgtcagtgagtgcaactattccgatcagcagggtccagggactgttgcgggttcttgggcaggggagaaacaaagcaaaaccacaggtggttttttctttcagatgagaaacactcaagcaccaacaggctcacccttgaaatgcatcctaactcattgggaccaatttggcccacaaaccctgaaaaagaggtggcttatttttttctgcactatggcttggccccaatattctctctctgatggggaaaaatggccacctgagggaagtataaattataatactatcctgcagcttgaccttttctgtaagagggaaggcaaatggagcaaaataccttatgtccaagctttcttttcattgaaggagaatacacaactatgcaaatcttgcaatttacatcccacaggaggacctctcagcttacccccatatcctagcctccatatagctccccttcctattaatgataagcctcctctaatctccccttcccagaaggaaacaagcaaagaaatctccaaggaaccacaaaaatcccccagctatcggttatgtcgccttcaagctgtagggggaggggaatttggctcaacccaggtacatgtccccttctcctattctgatttaaagcagatcaaggtagacctggggaagctttcagatgatcctgataggtacatagatgtcctacagggtctagggcaaaccttctatctcacttggagagatgtcatgctattgttagaccaaaccctggcctttaatgaaaagaatgtggctttaactgcagcccgagagtttggagatacctgatatcttagtcaagtaaatgatagaatgacagctgaagaaagggacaaattccctactggtcagcacgctgtccccagtatggatccccactgggacctcgactcagatcatggggactggagtcgcaaacatctgttgacccgtgttctagaaggactaaggagaattaggaaaaaagcccatgaaatattcaatgatgtctaccataactccgggaaaggaagaaaatccttctgccttcctcaagcagctacaagaggccttaaggaaatatgctcccctgtcacctgactccttcgagggtcaattgatcctaaaagataagtttattacccagtcagccacagatatcaagagaaagctccaaaagcgagccctgggccctgaacaaaatctggaggcattattaaacctggcaacctcggtgttctataatagggccaagaggaacaggcccaaaaggaaaagcgagatcagagaaaggccgcagccttagtcatggccctcagacaaacaaactttggtggttcagagaggacagaaaatggagcaggccaattacccgtgagggcttgttatcagtgtggtttactaggacactttaaaaaagattgtccaatgagaaacaagccaccccctcatccatgtctgctatgccaacccctcattcatgtctgctatgccgatgcaatcactggaaggcacactgccccagagggcaaaggttctttaggccagaagcccccaaccagatgatccaacaacaggactgaggatgcttgaggcaagtgccagcacatgtcaccctcactgagtcccaggtacatttaaccattgatggtcaggaaattgtcttcctccttgacactggtgaggccttctcagtgttaatctcctgtccttgatgaccgtcctc

SEQ ID NO: 3473 - DNA, 959 bp, Homo sapiens
  source 1..959: mol_type = other DNA
atctgatttttaaatggacaagagatctgaagacccctcagcaaacaagatatacagatggtaaataagtatgtgaaatgatctcaccatcatatgacattaggaaactgcaaattagaacaataataagatatgactatgcacctatttaaagtggctaaaatccaaaataattccaacaacaaatgctaataaagatgtgaagcaataagaatttgcattattgctggcaggaatataaactgctacagtcatatttggaagacaggttggcaattttttacaaaactaaacatagttttaccatgtgatatgccaatcatgctcctaggtatttaccaaagtgagttaaaaatacatgtctatacaaagcctgcactgaatgtttatagaaactttattcataattgccaaaagttagagccaatgaagatgtcctttattagaaaaactgtagcatatttatacaataattattattcagcaataaaaaatgagttatcaagccatagaaaatcatttaatgcttattggtagtagaaagaagccagtctgaaatggatgcaactataggcaaaaagacaaagctatgcaggcagtaaaaaaatcaaggtttgagaaatggaggagagatgaataggtggagcagaggacacttttaggacagtaaaactattctgcataacacagtaatggtggaaatatgacattacacatttatcaaaacccatataattttacaagacaaagagtcaaccttaatgtaaactataaatttagttaatgataatgtatcaatattagttcatcggttgtaactcatgtaccctactaatgcattatgttaataggggaaactggaaactgttggggaaggaagggtacatgggaattcttcatcatttctggcaattttcctgtgaaaccaaaaatattcttaaaaaaattgagttcattaa

SEQ ID NO: 3474 - DNA, 56 bp, Homo sapiens
  source 1..56: mol_type = other DNA
tatggtaagcagaactctgagatggcctcaagatttctactccctgctggcacatg

SEQ ID NO: 3475 - DNA, 56 bp, Homo sapiens
  source 1..56: mol_type = other DNA
tgtggtaagcagaactctgagatggccccaagatttctactccctgctggcacatg

SEQ ID NO: 3476 - DNA, 56 bp, Homo sapiens
  source 1..56: mol_type = other DNA
aagatctttaacacttgctgttatctctgcggcttctggaacaagcttttctacca

SEQ ID NO: 3477 - DNA, 294 bp, Homo sapiens
  source 1..294: mol_type = other DNA
gtggctcacacctgtaatcctaacactttgggaggccgttggcatgaagattgcttgatcccaggagtaagagactagcctgggcaacataggaagacctcatctctacaaaaaaatttaaaaattatctcggtgtggtggctcgtgcctatagtcccagctgctcaggaggctgaggtaggaggatcacttgagcccaggaggttgaggctgcagtgagctgtgatcatgccactgcactccagcctgggcaatagcatgagaccttgtctcaaaaaacaaacaaaaagaaaa

SEQ ID NO: 3478 - DNA, 305 bp, Homo sapiens
  source 1..305: mol_type = other DNA
gctgggcgtggtggcttacgcctgtaatcccagcactttgggaggccaaggtgggcagactacctgggtcgggagttcaagaccatcctggccaacatggtgaaaccctgtctctactaaaatacaaaaattagccatcaatggtgggcgcctgtaatcccagctactcaggggctgaggcaggagactcgcttgaaaccaggaggcagaggctgcagtgagccgagatcatgccactgcactccagcctgggcgacagagcaagactccgtctcaaaaaaaaaaaaaaaaagagaaaagaaaaa

SEQ ID NO: 3479 - DNA, 1258 bp, Homo sapiens
  source 1..1258: mol_type = other DNA
aaattggtacaagaagtggagtactgctaaaacaataacctaaaatatgttacatcagcttatttatgatgcagcaggtggtagagaatgtgatttggaggctagaaaaaggaggcccatgtttgcagtggcaaagtaattagtaaaactgtcacctgaaataattcaaaatcagatcacctatctgtttagattagctccagaggaaatgattgaaaagagcaaaagtaatactgtgttgaattttacattttacttttagtaaggttttactaaagagagaaactcaggaaatacttcacagaagtgagagtgtacaggaatatttctcaggaagggttggaaaagttgacttttataagacttctaataaaaaaaaaaaaaaaactagaagaggtcttgagtatagttacccttgagattaagtcctgcaacaaagatcaggaaaagggtttggtctttccattcaaagtcattattttagatggcttcaagatagctacgataaaggtctaaaggaactggcataggagcaaggcagcaaagcagtaaattaggcttgataattatgtaagaaagaactttgggtgtagttaccagaagcaaatcaatcagaagactacatttttagaggaattttattaatcatactaaatctggctcaaatatcattgttcgggtgttaaaacagagggtaactgtccaaccccaagcttgcataagtagaaaaatagagcataaaaccttaacagctccccagtacccacacaggatgtggccatggagaatgatggacaaaaaaagaacatttcagaagctcgtataaggagctgtactaaagactggacagggagtttctcctgaagactagaattggagtttcatcagaactttcttcagtttcaaggagatgggccgcaaaatgtttatgcagtatttcatcattattatacatgaatagtattgctcagtatcacattttttttctgaatgagagaatgtattatagttatctgtccctgagttaccactatatattgggtttgcagggatgggggtgacaataaagataatttgtctttttagttcttaggtcacatctgtacctaatgaagagaactgcacattttctgaaaatcctagactttgagcctgttccagtaactggttaaaactttagattgtctcctttgggacagggtatgttctgtgtgtggaaagacaggtaaaatacatgtttagtgatcagaatagtaga

SEQ ID NO: 3480 - DNA, 6477 bp, Homo sapiens
  source 1..6477: mol_type = other DNA
tggctggcaagatggccgaataggaacagctctggtctgcagctcccagtgagatcaacgcagaaggcaggtcatttctgcatttccagctgaggtacccagctcatctcattgggactggttagacagtgggtgcagcccatggagggtgagcagaagcagggtggggcatcgcctcacctgggaagtgcaaggggttggggaactccctcccctagccaagggaagtcatgagggactgtgctgtgaggaatggtgcattctggcccagacattatgcttttcccatggtctttgcaacccacagaccaggagactctcttgggtgcctacaccaccagggccctgggtttcaagcacaaaactgggcggttgtttgggcagacaccgagctagctacaggagtttatttttcataccccagtggtgcctagaatgccagcaagacagaattgttcactcccctggaaagggggctgaagccagggagccaagtagtctagttcagcagatcccacccccatggagcccagcaagctaagatccactggcttgaaattctcgctgctagcatagcagtctgagctccacctgggacactcaagtttggtggggggaggggcatccgccattaccaaggcttgagtaggcagttttcccctcacagtgtaaacaaagccactgggaagttcaaactgggcagagcccactgcagcttcacaaaaccactgtagccagactgcctctctagattctgcctctctaggcaggacatttctgaaagaaaggcagaagccccaggcaggggttgataaataaaactcccatctccctgggacagagcacctgggggaaggggcagctatgggtgcagcttcagcaagcttaaacattcctgcttgccagctctgaagagagcagcagatctcccagcacggtgctcgagctatgctaagggacagactgcctcctcaagtgggttcatgacccccttgcctcctgactgggagacacctcccagtaggggatgacagacacctcatataggagagctccggctggcatctgacaggtgcccctctgggatgaagcttccagaggaaggaacaggcagcaatatttgctgttctgcagactctgctggtgatacccaggcaaacagggtcttgagtggaccttcagcaaactctagcagacctgcagcagaggggccggactgttagaaggaaaactaataaacagaaaggagtaacatcaacatcaacaaaaaggatgtccactcagaaaccccatctgaaggtcaccaacatcaaagaccaaaggtagataaatccacgaagatgagaaaaaaacagctcgaaaaggctgaaaattccaaaaaccagaacgcctcttcttctccaaaggatcacaactcctcgccaacaagggaacaaaactggatggagaatgagtttgacaaattgacagaagtagggtacagaaggtatgtaataaactcctctgagctaaaggagcatgtcctaacccaatgcaaggaggctaagaaccttgaaaaaaggttagaggaattgctaactagaacacccagtttagagaagaacataaatgacctgatggagctgaaaaacacagcacaagaatgttgtgaagcatatacacaagtatcaatagctgaatccatcaagcagaagaaaggatatcagagactgaagatcagcttaatgaaataaagcatgaagacaagattagagaaaaaagaatgaaaaggaatgaacaaaacctccaaaaaataggggactatgtggaaagaccaaacctacatttgattggtgtacctgaaagtgacgaggagatggaatcaagttggaaaacactcttcaggatattatccaggagaacttccccaacctagcaagacaggccaacattcaaattcaggaaatacagagaataccataaagatactcctcaagaagaacaaccccaagacacataatcatcagattcaccaaggttgaaatgaaggaaaatacgttaagggcagccagaaagaaaggtcgggttacccacaaaggagagcccatcaggctaacagtggatctctctgcagagaccctacaagccagaagagagtgggagccaatattcaacattcttaaaagaattttcaacccagaatttcatatccagccaaactaagcttcacaagctaaggagaaataaaatcctttacagacgagcaactgctgagagattttgtcaccaccaggcctaccttacaagagcttctgaaggaagcactaaatatggaaaggaaaacccagtaccagccactgcaaaaacataccaaattgtaaaggccgttgacactatgaagaaactgcatcaactaacaggcaaaataaccagatagcatcatactgacaggatcaaattcacacataacaatattaaccttaaatgtaaatgggctaaatgccccttaatagaccgattaaaagacacagactggcaaattggataaagagtcaagacccatcggtgtgctgtattcaggagacccatctcatgtgcaaagacacacataagctcaaaataaagagatggaggaagatttaccaagcaaatggaaagcaaaaaaggaaaagcaggggttgcaatcctagtctctgataaaacagacttcaaaccaacaaagatcaaaaaagacaaaggcattacataatggtaaagggatcaatgcaacaagaagagctaactatcctaaatacatatgcacccaatacaggagcacccagattcataaagcaagttcttagagacctacgaagagacttagactcacacacaataatagtgggagactttaacaccccactgtcaatattagatcagtgagacagaaaattaacaaggatattcaggacttgaactcagctctggagcaagctgacctaatagacatctacagaactctccatcccaaatcaacagaatatacattcttctcgcaccacatcacacttactctaaaattacctacataattggaagtaaaacactcctcagcaaatgcaaaagaacggaaatcataacaaacaatctctcagaccatagtgcaatcaaactagaactcaggattaagaaactcactcaaaaccgaacagctacatggaaactgaacaacctgctcctgaatgactactgggtaaatacgaaattaaggtagaaataatgaagttctttgaaaccaatgagaacaaagatacaatgtaccagaatctctgggacacagctaaagccgtgtttagagggaaatttatagcactaaatgcccacaaaagaaagcaggaaagatttaagatagacaccctaacatcacaattaaaggaactagagaagcaagagcaaacaaattcaaaagctagcagaagacaagaaataactaagatcatagcagaactgaaggagatagagatacgaaaaacccttcaaaaaatcaattaatccagaagctggttttttgaaaacattaacaaaatagactgctagccagactaataaagaagaaaagagggaagcatcaaatagatacaataaaaaatgataaaggggatatcaccagtgatcccacagaaatgcaaactaccatcagaaaatactataaacacctctacacaaataaactagaaaatctaaaagaaatggataaattcctggacacatacaccctcccaagactaaaccaggaagaagttgaatcccttaatagaccagtaacaagttctgaaattgaggcaataattaatagcctgccaaccaggtaggctattaaaaaaaaaaaagcccaggaccagattcacagccgaattctaccagaggtacaaagaggagctgtaccattccttctgaaactattccaaacaatagaaaaagagggactcccccctaactcatgtttaactcattttactcctcccagcatcatcctgataccaaagtctggcagagacacaacaaaaaatgaaaatttcaggccaatatccctgatggacattgatgcaaaatccttaataaaatactgacaaaccccaaatccagtggcacatcaaaaagcttatccaccacaatcaagtcagcttcatccctgggatgcaaggctggttcaacatgcacaaatcaataaacgtagtccatcacggaaacagaaccaatgacaaaaaccacatgattatttcaatagatacagaaaatgccttcaataaaattcaacaccccttcatgctaaaaactctcaataaactaggtattgatggaacatagctcaaaatattaaaagatatttatgacagacccacagccaatatcatactgaatgggcaaaagctggaagcattccctttgaaaactggcataagacaaggatacccactctcaccactcctattcaacatagtattggaagctctggccagggcaatcaggcaagagaaagaaataaagggtattcaaataagaagagaggaagtcaaattgtctccgtttgcagatgacatgattgtatatttagaaaaccccatcatctcagcccaaaatttccttaagctgataagcaacttcagcaaagtcccaagatacaaaatcaatgcggaaaaatcacaagcattcctatataccaataatagacaaacagagagccaaatcatgagccaaatcccattcacaattgctacaaatagaataaaatacctaggaatccaacttacaagggatgtgaaggacctcttcaaggagaactacaaaccactgctcaaggaaataagagaggacaaatggaaaaacattccatgttcatggataggaagaatgaatatcgtgaaaatggccatactgcccaaagtaatttatagatccaatgctatccccatcaatctaccattgactttattcacagaactagaaaaaattactttaaatttcatatggaaccgaaaaagagcccacatagccaagacaatcctaagcaaaaagaacaaagctggaggcatcacgctacctaacttcaaactatactataaggctacagtaaccaaaacagcatggtactggtaccaaaacagatacatagaccaatggaacagaacagaggcctcagaagtaatgccacacatccacaaccatctgatctttgacaaacctgacaaaaacaagaaatggggaaaggattccctatttaataaatggtgttgggaaaactggctagccatatgcagaaaactgaaactggaccccttccttacaccttatacaaaaattaactcaagatggattaaagacttaaatgtaaaacctgaaagtataaaaatcctaaaagaaaacctaggcaataccattcaggacataggcatgggcaaggacttcatgaataaaacaccaaaagcaatggcaacaaaagccaaaattgacaaatgggatttaattaaactaaagagcttctgcacagcaaaagaaattatcatcagagtgaacaggcaacctacagaatgagagaaaatttttgcaatctatttatctgacaaagggttaatatccagaatatacaaagaacttaaacaaatttataagaaaaaaacaaccccatcaaaaagtgagcgaagcatatgaacagacatttctcaaaagaagacatttatgtggccaacaaacatatgaaaaaaagctcatcatcactggtcattagagaaatgcaaatcaaaaccacaatgagataccgtgtcatgccagttagaatggtgatcattagaaaggcaggaaacaacaggtgctggagaggatgtggagaaataggaacatttttacactgttggtgggagtgtaaattagttcaaccattttagaagacagtgtggtgattcctcaagatctagaaccagaaataccatttgacctagcaatcctattactgggtatatacccaaaggattataaatcattctataaagacacacgcacacgtatgtttattacagcactattcacaatagcaaagacttggaactgactcaaatacccatcaatgacagactggataaaaaaatatggcacgtatataccatggaataatatacagccataaaaaaggatgagttaatgtcctttgcaggggcatggatgaagctagaaaccatcattctcagcaaactaacacagtaacagaaaaccaaacactgcatgttctcattcataagtgggagttgaacagtgagaacatgtggacacagggaggggaatattacttactggggcctgtggtggggtggggggctaggggagggatagcattaggagaaatacctaatgtagattgacgggttgatgggtgcagcaaaccatcatggaacatgtacatctatataacaaacctgcatgttctgcacatgtattccagaacttaaagtataataataataaaaa

SEQ ID NO: 3481 - DNA, 294 bp, Homo sapiens
  source 1..294: mol_type = other DNA
gccaggtgtggtggctcatgcctgtaatcccagcactttgagaggccgaggtgggcagatcacttgaggcctggagttcaagaccaccttggcgaacacggtgaaaccccgtctctacaaaaaatacaaaaattagccaggcgtggtggcacgtgcctgtagtcccagctacttgggaggctaagtcaggagaattgcttgaacttgggagatggaggttgcagtgagccaagattgcaccactgcattccaacctgggtgatgaagtgagactctccaaaaaaaaaaaagaaa

SEQ ID NO: 3482 - DNA, 296 bp, Homo sapiens
  source 1..296: mol_type = other DNA
gccaggcgcagtggctcatgcttgtaatgccagcactttgggaagccgaggtgggcggatcacctgagttcaggagttcgagaccagcctggccaacatggtgaaactactaaaaatataaaaattagctcggcatggtggtgcatgtctgtagtcccagttactggggaggctgaggcaggagaatcgcttgaacccagaaggcagaggttgcagtgagccgagatcacaccattgcactccagcctgggggacaagagcgagactttgccttaaaaaaaaaaaaaaaaaaacaa

SEQ ID NO: 3483 - DNA, 1253 bp, Homo sapiens
  source 1..1253: mol_type = other DNA
gaggggtcttgaaaaagtgcatggaaaatgcatatcatgaaaaaactatgcatggatttcaaaatttttggaccaaaataaactcctactaacttgttataacatgtctgaacaggatctagtttgaagcactaagaagaataagacatcagtttgaaaagaggctctatcagaacaacacgaattctgctaaaattgaagcaagaacaaacatcaaatatatgttgacacttgggtggaagaatggtgaactaattgatgctttatgaaaagttgatagggacagtgctccaaagaaatcagtttacaaatggataactcgttttaagaaggcataaggtaatgttgaagaagaagcccacagtggcagatcatccacatcagtttgtgagaaaaaagttagttcatggcgtaattgaagaaaaccaacaattaacagcagaaacaacagccaacaccatagacatctcagttggttcaccttacacaattttgactggaaaagttcagcaaactttatacctgataggtaccaaaaccattgcacccagatcagctacagacaagaatagagctttcaatggaaattttaaataagtgggatcaggatcttgaagcctttcattgaaaaattgtaacaggagatgaaacatggctttaccagcgcaatcctgaagacaaaacacaaagcagtggttaccaagataagtagttcagttaaagcacaagaggactggttgagagcaaaggtcatggcaacagcttttgaatgctcaaggcattttgcttgttgactttctgtagggccaaagaatggtaacgtgcttatcatgggagtgttttgagaaacttagccaaagcttcagcagaaaaatccccgagaaagaccagagagttcttcaccacaacaatgttcctgctcatccctctcatcaaacaaggccattttgcaagagttttgatgggaaatcactaggcatccaccctacagtcctggtttggcaccttctgactttttgtttcctaatcttaaaaaaatttttcagggcagtacatttttctcaagttaatgtataaagaaactgcattgatgtagataaattcccagaactctcagttctttagggatggactaaatagctggtatcatcacttacaaaagtgtcttgaatgctatagagctaatgttcaaaaatatagtttatattttttatcttttaaccatttttccacaaactttttgaagtctcctt

SEQ ID NO: 3484 - DNA, 299 bp, Homo sapiens
  source 1..299: mol_type = other DNA
gctgggcacagtggctcatgcctgtaatcccagcactttgggaggccgaggggggtggatcatctgaggtcaggagttctagaccaacctggccaacatggtgagaacttgtctgtactaaaaatacaaaaattagctgggtgtggtggcaggcgcctatgatcccagctactcaggaggtggaggcaggagaattgcttgaacccaggaggtggaggttgcagtgagctgagatcgtgtctttgcactgcagcctgggtgacaagagcaaaactccatctcaaaaaaaaaaaaaaaaa

SEQ ID NO: 3485 - DNA, 299 bp, Homo sapiens
  source 1..299: mol_type = other DNA
ggccgggcacggtggcttacacctgtaatcccagcactttgggaggccgaggtgggcagatcacctgaggtcaggagttcaagaccagcctggccaacttggtgaaacctcatctctattaaaaatgcaaaaagttagctgggcatggtggtgggtgcttgtaatcccaactacttgggaggctgaggcaggagaattgcttgaacctgggaggcggaggttgcagtgagctgagcttgagccactatactccagcctgggcgacacagcaggactgtctcaaaaaaaaaaaaaaaaaa

SEQ ID NO: 3486 - DNA, 291 bp, Homo sapiens
  source 1..291: mol_type = other DNA
gctgagcgcggtggctcacgcctgtaatcccagcactttgggaggccaaggtgggtggaccacatgaggtcaggagtttgagatcagcctggccaacatggtgaaaccccatctctactaaaaatacaaaaattagccggacgcagtggcacgcgcctgtaatcccagctactcaagaggctgaggcacgagaatcacttgaacccgggagggagaggttgcagtgagccaagatcgtaccactgcactccagcctgggtgacagagtgagactctgtctccaaaaaaaaa

SEQ ID NO: 3487 - DNA, 304 bp, Homo sapiens
  source 1..304: mol_type = other DNA
gccaggtgtggtggctcacgcctgtgatcccagcactttgggaggccaagacgggcggatcatgaggtcaagagatcaagatcatcctggccaacatggtgaaaccctgtctctactaaaaatacaaaaatgagctgggcatggtggggcgtgcctgtagtcccatgtacttgggaggctgaggcaggaaaattcttgaacccaggagacggaagttgcagtgagctgagatcacaccactgcactccagcctggtgacagagcaagactccggctcttaaaaaaaaaaaaaaaaaaaaaaaaa

SEQ ID NO: 3488 - DNA, 334 bp, Homo sapiens
  source 1..334: mol_type = other DNA
agttggccctccatgtccataggcttcgcatctgtgattcagcccactgtgggtcaaaaatatttggggaaaaaaatggatggttgcgcctttgctgaacatgtacaaacttttttttgtcattaaacaatatagtataacaactatttacaaagcatttacattgtattagctattataggtaatctagagatgatttaaagtgtatggtaggatgtgcataggttatatgcaaatactacaccattttctataagggacttgaacatcatggactttagtatcctagggggttcttggaacccatcacccataggggcaccataggacaact

SEQ ID NO: 3489 - DNA, 479 bp, Homo sapiens
  source 1..479: mol_type = other DNA
agtgcccatctaaaaataaaaaatcagtgtcaaaaaatggtagctgcatacccatgttaaaagcaacattattcacaaaagtcaaaaggtagaagcaacccacctgtccatcaacagatgaatgaaaaatgtatatatacacacaatggaatactaaaaagccctgatgaaggaaattctaacacttcataaaacatgaggggaagctaaggacattaagtgaataagccagcccccctccaaaaaagacaaatactgtatgattccacttatatgaggtataagaagtcaaattcatagaaacaaaaagaatggtgattgccactagccaaagagaagggagtttagggttatagagtttacagagttttggaagatgaacaagagttctggagattagttgcacaataattggttgcagaaagtacttaacattaactgtacacttaaaaatagttaatactgtaaatgtttatgtt

SEQ ID NO: 3490 - DNA, 725 bp, Homo sapiens
  source 1..725: mol_type = other DNA
actacattaaaactttattcaacaaaataccataaagtaaaaagaaaagtcacaagatagactagaagatatttgcaacatataaaactgacaaatgattgatgtctagaataaaagaactcctaaaaattattcagagaaaaataattcaatacaaagttgagcacaggatatgaacaggttcttcacaataaaatgtccattagaatgaaggatttaacgagaattgaggaaaatgcaaactaaagtcataataaaacaccattccatactcatgtaattcacaaaaactcacatttactttgaagagcaatttggcaatgtctataaggctaaatgtgtttattctgtgatacgtcttaggtaacacgcagtgagcccaatgcagaagaatgttccactacagtgttataatacagaaactggcaacaacttcatgccttcaactggagaacagataaattatggtagttcccgtaattgaattctgctacacaggactaaaattaatgaacgagagcttcagatataattatacaataatgagtgaaaaaagctgtagaatgagcaagtatgaggcttaaaaatatataaaacagtactaaagagtagatggtttaggttatacacagtgaaagtacaacaacacaggaatgataaacatcaaattgtggataattgttacctctggaggggaggaatggcaatgtgatctcgaagtggca

SEQ ID NO: 3491 - DNA, 104 bp, Homo sapiens
  source 1..104: mol_type = other DNA
ctgtgatattatcttgaagggaggtactgtgccttgttcatacctgtaccccaaattcctaggatggcatctgcccttcagggggcactaaaatgtattattga

SEQ ID NO: 3492 - DNA, 294 bp, Homo sapiens
  source 1..294: mol_type = other DNA
ggccgggtgcggtggctcacgcctgtaatcccagcactttgggaggccgaggtgggtggatcacttgaggtcaggagttcaagaccagcctggccaacatggtgaaaccccatctctactaaaaatataaaaatcagccgggcatggtggcatgtgcctgtaatcccagctactcaggagtctgaggaggagaatcacttgaacctggaggcagaggttgcagtgagtcgaggttgcgctactgcactccagcctggacaacagagggagactctgtctcaaaaaaaaaaaaaa

SEQ ID NO: 3493 - DNA, 318 bp, Homo sapiens
  source 1..318: mol_type = other DNA
ggccaggcgtgggggctcacacctataatcccagcactttgggagcccaaggaggacggatcacctgcagtcaggagttccgagaccagcctggccaacatggtgaaaccctatctctactaaaataactaaaataagccaggtgtggtggcacgcacctgtagtaccagctacttgggaggctgaggcaggagaatcgcttgaacctgggaggcagagggtgcagtgaaccaggatcgtgccactgcactccagcctgggcaacagagtaagactctgtctcgggggcaaaaaaaaaaaaaaaaaaaaaaaaaaaaa

SEQ ID NO: 3494 - DNA, 306 bp, Homo sapiens
  source 1..306: mol_type = other DNA
gctgggcgtggtggctcatgcctgaaatcccagcactttgggaggctgaggcaggcggatcacctgaggtcaggagttcgagaccagcctgaccaacatggcgaaactctgtctctactaaaaatacaaaaaattagctgagcttggtggtgggtgcctgtaatcccagctacttgggaggctgaggcaggagaatcgcttgaaccctggaggcagaggttgcagtgagccgagatcgaaccactgcactccagcctaggtgacaagagcgaaactttgtctcaccaaaaaaaaaaaaaaaaaaaa

SEQ ID NO: 3495 - DNA, 482 bp, Homo sapiens
  source 1..482: mol_type = other DNA
tctccgaagtggaaagcataaagctttccaagctaaatgggtatggaaagaaaataccagaatttctatttttacctatcaaaaattagaaactaagctttacaaatattcaatatatggatcaaaaccagccttttagtaagaccacaggtcagatgatcatatgtcacttactggtactcaaggtacccagaggaaaaaacaagaagtactcaatgtagaagaactgactttccttacctgctggctccttttcagtgtactgtgacatatatggcagcgtctgtgtgaccagttcagtagaattatagatgtgatttagtttttattcacactatggacaagccgcagaagattcctacaaagaaacaatgaattgaacaatatattaataaaagcacaaaaatagcaaaactgatacttctgctcctcctagtgaagtcttataataaaacttagaaaaatacaatgtgatgtagcca

SEQ ID NO: 3496 - DNA, 1902 bp, Homo sapiens
  source 1..1902: mol_type = other DNA
aaaacaaatattacaaggtattatgcatttatggcatttgtaaaaggtaaaacagtaatagcacaaaagataaggagaaattgtaaatatacattgtaaatatactgttgtaaagctctgacactatataaaatgtggtatagtattgcttccatatggtctattattaaagatgtaaaatataaatcacagagaagccaattaactttttaaaagagaggaaaagttgagtgtaagtagtgagccaatggtgaagataaaatgcactcaaaaataggcatcagagagcacataagtagaaaacaattaagattgtatatttaaatccaactacatcaaaattacattaaatgtaaatagtctaaacacttcaatgtaaaaacagatttttcaagatgaattaaaaaaggctgtctagaacaaacccattttaaataaaagacagattaaatggatggaaaataatatacaaacactaaaaggaggctggagaggctgtattaatattagataaagtagactttggaatgaggaatactatcagagataaagagggcattatataatgattaaggggttcattcaccaaaaagttttaacaatcctaaatttacatgcacctaacaggaggttcaatacacatgatgcaaaaactgaaaaggagaaataaacaaacttaccattatacttggagacttcaactcttctctcaatgatcaatgaaacaaacaaaaactcagtaaggaaagagaaggcctaacaagcatcatcaatcaacttgatatagaatactccactgctaaacagcagaatacacattattttgaagtgtacatgggacatttactgagagtaaccatattctggtcataaaacaaatatcaaagaatttaaaataaattatacaaagaaagagacatgcaaaatcaccaaatatttggaaattaaacagcaaccttcatgggtcaaagtggaagtgacataagaactttaaaaaaaatcagtgcatcaaatttgtgtaagcacctcaggcagtgcttggaaggaaaagaaaaaaggtctcaagtcaatgacctaagcttacaccttaataaattaacatagaggaatttaaacccaaagcatatagaaagaaatagtaagaagcagaaatcaataaaactaacaattaaaaaaaaagcaatcaaataaaaagttgactctgaaaagattaataaaataaacctagaaccaaataaaaatgagaggtcacactgctaataacaagaatgaaaggaaagacaccactacagacgttataggcattaaaataattaagaaacaactttatgacaacgaataaatgaaataagacaaatgccttgaaagacaaaaactactaacgctcacttagtgagtgaaagtgattcatacaaagaccgaaagctttcaagaagaaatagataaccctaataatcctgtatttattaaaggataattggacttatcctttgaagccttccagcaaagaaaactctaggaccagaagagttcacatgcaaactctaaaaaaaattgtaaaacaaataatactaatcctaataaattctttttcaaaaatataagaaacactttgcaactctatgaaaccagcattatatgaaaaagtatctttcatgaacatagatgcaaaaaaaaaaaaaatttcaccaatttataaaaatgatagtagataatacaccatcaccaagtgaggtttaaccacagaatggaagatgattcaacattcgcaaataagttaacgtaattcatcacattaacacagaaacaaaccatatgatcatctcaataaatacagtaataatacctgactaaaatcaacatccactcatgatttaaaaaaaaaaaaaaaaaaaactctct

SEQ ID NO: 3497 - DNA, 2358 bp, Homo sapiens
  source 1..2358: mol_type = other DNA
ctgatataactattttgaaactctggagtctattgaagacttaaaaatttcagaaggcttggacagtaaagtacagtatatttggtcaatctcagcttagctcacagtagctacccatcccccacccctcagccctgtagcaggcagctgtgcacatgttcctagagcagcttacttgcagctggcagaaaccagggttgacacaaaagaccccgtcctctaaatatcgtggatctgttctttctgctgattgctgcttctcactacagtgacacaaacacagaggcaagcagccattgttgcacatacccataccatgattgcaagcccctctatctttggctgaagttattttcagaggatttaaagagctgacaccgtcaccctcctcatccactttatgtttttcttttccctttttgggagccagtcattaaagactagcatattcaaaagcaactgcatatacaagagaaataagagagccagtatgcatgcccagggaaactctcatgctcagaaaacatctgtgaagatcttaaggctaattctcaacacagagacagcctaaaacagtcaaaaacaaaacaaaaacaaaaaattacaaaccctggaaaagaggaagaatctgatttccagataacccattattacattcaaattttcagtttcaacaacaataaaaaaccacaaggcatacaatgaaacagggaagtatgaccagttcaaggaaaaacaacaaacaaactaaaaaaaaaaaaaaaaaaaaacagaaaccatagctgaaaaatggcacaaaggtagatctactagacaaagactttaaaacaactgttttaaagatgttcaaagaattaaaggaagatatgaagagagtcaagaacatgatgtgtgaacaaaatggaaacataaataaaggcatagaaaacctaaaaacaaaccaaaaaatttagagctgaaaagtacaataattgaaatgaaaaattcactaaagaaatgaaaaggcagatttgagcaggcagaagaaagaatcagcaaagttgaaagacaggaaaatttaaattactgactttggagaacagaaagaaaaaagatcgaagaaaaggagcagagcttaagggttctgtggacatcatcaagaagatcaaatacacactacaaaagactcaggagaaaaaaagtgggaaagggatagagagattattagaggaaataatggctgaaaacttaccaaatttaacaaaaggcataaatataaacattcaagactcaatgagattcaaataggataagctcaaagatacctagactgaaacacattacaatcaaattgttgaaagacatagataaagaatcttgaaagcagagagaagtgactcatcacacacaagaaatccaaaataaggttatcagctgattttttaatcaaaattttgaagaccagaggtagtaggttgatatagtcatggtgccgaaagaaaaaaaaaactgtcagccaagaatcctatgtccagcagaagtgagggaaaacttaagacattccctgataaacagaaactaagagagttcactaccactagacctgctctgtaagaaatcctaaagggagtcctgcatgttgaaatgcaagaacactaaacagtaattcaaaggtataagaagaaataaagatcttagtagagataaatacatgggcaattataaagctcatattgttttaacaatggtttataatgctacttttgttttctacataattcagtacatttaagaaaaagcaattactagtttaaaggctagcattattgtgactttgtttcctaactccacatttttttctacataattaaagagaaattttctacataattcgtttttaaaaaccaattatttatgtttttggacacacaatgtttaaagatgtaattgtgtgacatcaataactgaaaagtgtgagatggaactgtaaatgaacaaagtgtttgtatgttattgaagttaacctggtataaattcaaattataatggtataatgttaaatgtaatccctgtggtaaccacaaagaaaatcattaaactatatagacgaaagaaaataaggaaattaaaacatttcactacagaaaacaatcaacacaaaggagatagtggtgcaggaaattagggacaaacaaaaaagctacaaggcatatagaaaacagaaaaacgctagaaataagaccctttttatgagtaattactttaaatatacatggataaactctccaatcaaagacagagattgacagagtgcattaaaaaaatatgatgcaattatatgttgcctacaaaaaacttactttagattcaaagacagaa

SEQ ID NO: 3498 - DNA, 59 bp, Homo sapiens
  source 1..59: mol_type = other DNA
aagagctgtgaactgaaattgtattgcttacagaaatcatgaaccgaattttcttctct

SEQ ID NO: 3499 - DNA, 589 bp, Homo sapiens
  source 1..589: mol_type = other DNA
aaaattaatcaatttgattgtatacaaatataaaacatttatttaaacagacaccatgtaaaattaaagccaaatggctaagtaggagaaaacattggcaacagacataaaatacagaaaatacaagagaactcctaacaaatccatgagataaaaggacaaatcattcaatagaaaaatgagaggaaaaagaaaattaacaaatgtttatatgttctaaaataaacatacaaaaatatgtccatcttcactagtgagaaatttctgatttaaaaccaaaataattttttcagagtaattaaattacaaaaatccaatagcaagtgtcattaattacatggggaagcagatgctcatatcttgctcaggggaactgtaacttgatacagccattctggaacccaaatggaagtatctcttcaaattaaaaatggttatactctggcctgaaattcaaatcctaagcatataccacagagagagccttatatgtacaaaaagggctcatgtaggatgatgttcctttcagcattgtttgtaattataaaggaataaaaagaaggaaaacttccttaagtgtctattatag

SEQ ID NO: 3500 - DNA, 1049 bp, Homo sapiens
  source 1..1049: mol_type = other DNA
cttggacctcctctcctctccatcacctctcacagaaggctagggtgacatcatatggtttcatggcattgaagatcatctgtattctggtgactccaaacaggtatctccagcatgaacctcagatcctgtgtccaactgtctgctctatcctctccactggatgtcttatgagtgtctcaaatatagcatgtccacaaccaaggtctctcccagacctgacccttccatagtattcccccagaaaatgaccagttattcttgcagagacctgggacagacaccttggcgtcttctttgactcgtatgcaatccacctcatacctaatctatcaacaaatctggttgtccttctgaattttcgcagactttaacacttctcttcatcttcattgctttctctctggtccaaaactctcatcatccctctcctggcttattcctgagcacccccttacctagtctccctgtgcttccttcaccctagatggtctcctattgcagtggcaaccagagttatcctgttgaaaccttagtcagagcacgtcactccttcacaccaaaccctcctcatctcagtgtaaaatcaagtctttgcagggcagatgtggaagctccctatgacctctccaaccccacctagtcctctggaaattaataaattttctgaggccactggttgactgtgattcctatattacatgctctgagatcctgcctcagggaatttgaacttgctgcttcctggagtctcttcctcttggcattcatgcagctcagtcctcacctcactcacgtctttcccagagaagcttttcaggccaccgtacttaaaatcttaccctcagctcctttccctgcttaattttctccacagccccaattaccttctaatatataatgtattacttattcatcttgttttatttccatctttccccactgtaaggtaagcctgttaagagcagagagttctcttatttccttgctggcatatcccatgtacctagaacaatgcccaatctgtagtagggacttaataaatattt

SEQ ID NO: 3501 - DNA, 1474 bp, Homo sapiens
  source 1..1474: mol_type = other DNA
gccaagatggaatgacaaggttcaaatttacctttcttcaaggaaaaacaacagcaacaaagaaaagacatatgtgaaacattggggttttttagtaagacactagacattagtcagcaaaggacaatgatctctgaaagacaggaaacaaaagaaggtgagtcctctgattgtctcagctcaccaccttgagagagagtttccaagccatggtatgaagattgagggaccagggggatctcggtagactcactgtgttcaggagatggatcggggaatcgggagatatcaaagtgatcagagttcataggacaaaatatcaaagaggagagagccacacatagaaccctagagatgtgcagaggactccccttaaatattcaacagagaactctcagcacatgtgtctgaggcaaatacccaaggctgggaaagaaacacctgaaattattagggagaatgaaatcggacactcatgtgggggtgcatatagtgcatgttctcaagagccagagaagaaaatctcataatccatgggccactggggagaatagtcagtagggtcttgcctcagtacagaggaataattagccctggactaaccatgctctagtctttcctatcaaatcttaaattagacccaaaaggatcaacagtttccaagtaaattaactgcatcctagaacaaagctttaagatacccgtaggaatacaaaaatattcagcacccaacaaattaaaattgagaatgtctggcatacaactaaaaactatcctgcaagtaaatagaaaatgcaatccataataaggagaaaaataaataaatgaaaactaagaactgacagatgttaaaattatcaaataagcaattattataacagtattccatgtgttcaaaacattttaaaagttacacatggaaaatgtataaaagactcaaataaaacctctagagtctgaaatgcagtgtctgaaatgaaaaatacatggggtgtgattaacagcagtttagacattgcagaggaaaagatcagtgaacttgaagacaatagaagctatccagcatgaaacacagaaagaaaaaagaaaggtacagatcatctgtgggtgtcaagtggcacccgctatatgtagacagagtaccctaatgagaggacagagaaaggaggaagagaataggaaaaaatttttgaaaaaataatgactgaaaatttcccaaatttaatgaaactcatacactcacagatcaaagcagcttaaacagcctcaagcacaaggaacatgaagaaataaaaccaaggtgcatcaaaatcaaactgctcaaagtcagcaataaaaagaaaatcttcaaagcatccagaggaagaaaagacatgttccatacaagataaggaagaccgcagatttcttatcagcaacaacgccagtgagaagacagggaggcagcatctataaagcactaaaaaaaaaagaa

SEQ ID NO: 3502 - DNA, 379 bp, Homo sapiens
  source 1..379: mol_type = other DNA
gcctggaaacccaatggcattggctgggctgggtttccaggctgctttggagcagcaactccattttattttcaattcccccttttagaactggagtgtctataattgttactatgtcgtcccatcactgcatgttgggagcagatatgttgcttccttattttcacaggttcacagacggagagaagttcttccccaggagctgtacttaacagattactcatccagctcggatttggatgattcagattttggacttttgagctgaagagatttaagactttgagatgatgctgtaatgggatgaaacctttggggactgtggatggaatgaaagtatgtggcatgaatgtgactctttggaggccagagggtggac

SEQ ID NO: 3503 - DNA, 619 bp, Homo sapiens
  source 1..619: mol_type = other DNA
gtggtagggagaattctaaagacatctctccaagattcctaccctttggtcgctcaaccaaatactaactggggaaggggctttgcaggtggaatcaaggttgctaatcagctgaccttaggatagggaaatgatcctggattatcctgctgggctcagtgtaatcacaggaactcttcaaatcagaagaggaaggcacaagggtcagactgagagatgtggctgaggagggagcaggagaaagggggaaagatagaggtagtggggctactcaggtggctttaaggatgaaggaagggagcaatgagccaaggaatatcatgccctctagaatctgagaacaactcctggctgacaccccacaaggaaatgcagcccttagtctacttcatgggtctgaatttagccagcaacctgaacgatcctggatacaggctcttctgtgcaaaaagagcccaatggccaatgccttgatttcagactcgagaggctccaaacagagaaaccagccaagacccctgcatttctagagtgcaggactctgcagtaatcaattagtaatgttctcagccattacgtttgtggtaatttgttatggtagcaatggaaaactactata

SEQ ID NO: 3504 - DNA, 377 bp, Homo sapiens
  source 1..377: mol_type = other DNA
gctatagtttgaaggtgttctccaaattcatgtgttggaaacttaatcccaatgtaacagtgttgagaagtgggaacttgaggaggcgattagatcctgagggctctcaatggattaacatttttatgggagtgggttccttattgcaagagtgagtttgttataaaactgagcctggcctccactcaccctctggctctctcttgcccttccaccttctgccctcaaccatgatgcagcaagaaggccctcaccatatgccagccccctgaccttgtacttcccagcctccagatacgtaagaaataaatctctgttctttataaattacccagactgtggtattctgttatagcagcataaaatggactaagaca

SEQ ID NO: 3505 - DNA, 448 bp, Homo sapiens
  source 1..448: mol_type = other DNA
tgttttgagtaaaattatacctccctccaagattcacattttgcagtcctaaccccaactactgaagaatgtgaccttatttggaaataagttcattgctgataaagttagtttagatgaagtcattaggatgggctccaatccaatgtgactgatcattacaaaaatgggaaatttggacacaaagacacacactcccagggagaacatccacgtgaagatgaaggcagagatcagggtcctgctcctacaagccaatagagcatcaaagactgccagcaaaccaccagaagctaagagagaggcccagaacgagttttttttcacaacccttggaaagaaccaaccctgcagacaccttgatcttgaactgtgaaacaatacatttctgttgcttaagccacccagcttgtggtaatgttttacagcagctctagcaaactagtac

SEQ ID NO: 3506 - DNA, 159 bp, Homo sapiens
  source 1..159: mol_type = other DNA
attatctctgtgaccttggttaagtcattaaatttttgtaccattttcttctgtaagataaagatatggttctactttgtggcattgttgtgaaaattgaatattagtatataggaaatgcccagcatatctccctgagaggcagaagaccttttataa

SEQ ID NO: 3507 - DNA, 52 bp, Homo sapiens
  source 1..52: mol_type = other DNA
agaaacaaactggggtatcttcaacatgaaatgatttaggagcatagcctga

SEQ ID NO: 3508 - DNA, 264 bp, Homo sapiens
  source 1..264: mol_type = other DNA
gccaggcacattggctcatgcctgtaatcccagcactttgggaggccgaggtgggtggatcagtggtcaggagttcgagaccagcctggccaacatggtgaaaccctgtctctactaaaaatacaaaaaaactagctgggtatggtggcgggcacctgtaattccagctactcaggaggcagaggttgcagtgagccaagatcacgccactgcacttcagcctggtgacgagcaaaactccatctcaaaaaaaaaaaaaaaaaa

SEQ ID NO: 3509 - DNA, 305 bp, Homo sapiens
  source 1..305: mol_type = other DNA
ggccaggcacagtggctcacgcctgtaatccgagcactttgggaggccgaggcaggcagatcacaaggtcaggagttcaagaccagcctggccaatatgatgaaacccccgtctccactagaagtacaaaaattagccagacatggtgctgtgtgcctgtagtcccagctacttgagaggctgaggcaggagaatcgcttgaacccgggaggcgggggttgcagtgggccaagatcgcaccactgcactccagcctgggcgacagaaggagactccatgtccaaaaaaaaaaaaaaaaaaaaaaa

SEQ ID NO: 3510 - DNA, 402 bp, Homo sapiens
  source 1..402: mol_type = other DNA
ggagtcactcatgctaaagttccacgttaccaatcgagacgtaagttgtttacgtgtaagatctgaccttcccagaagccaagagagaaatgatggccacatttccaagcaaacctttcaaaacaaaacccaggagatttcacagtaactgacccaccaaaagggcccagtcaacctgagcaacataatagggaagtcccctctgcttaaacccacaccatactgaaggtaaccaatgtgctttttgcactctgctgtctccttgttcctactaaagctgccttactgaagacaattgttctgagatacctggtggagctccatactattttctagactggatgttgcccagttcatgaatcattaataaaagccaatttgatctttgaaactaaatgtgtt

SEQ ID NO: 3511 - DNA, 310 bp, Homo sapiens
  source 1..310: mol_type = other DNA
gccgggcgcagtggctcacgcctgtaattccagcactttgggaggccgaggcgggtggatcacgaggtcaggagatcaagaccatcctggctaacatggtgaaaccccgtctctactaaaaatacaaaaaattagctgggcgtggtggcgggcacctgtagtcccagctactcgggaggctgaagcaggagaatggcgtgaacccaggaggcagaggttgcagtgagtcgagaccgcaccactgcactccagcctgggtgacagagtaagactctgtctcaaaaaaaaaaaaaaaaaaaaaaaaaaagaa

SEQ ID NO: 3512 - DNA, 309 bp, Homo sapiens
  source 1..309: mol_type = other DNA
gctgggcgcagtggctcacacctgtaatctcagcactttgggaggccaaggcgggcagatcatgaagtcaggagtttgagaccagcctggccaacatagtgaaaccccgtctctactaaaaatacaaaaattagcggggtgtggtggcacctgcctgtagtcccagctacacgggaggctgaggtgggagaatcacttgaacctgggaggcggaggttgcagtaagccaagactatgccattgcactccagcctgggtgaaagagtgagactccgtctcaaaaaaaaaaaaaaaaaaaaaaaaaaaaaa

SEQ ID NO: 3513 - DNA, 536 bp, Homo sapiens
  source 1..536: mol_type = other DNA
atttgaccctgcaatcctattattgggtgcatacccaaaagaatataaatcattctgttataaagacacatgtacatgtatgttcattgcagcactattcacagtagcaaagacatggaatcaacccaaatgcccatcaatgataaactggataaagaaaatgtggtacatatacaccatagaatactacgcagccataaaaaggaacaagatcatgtcctttgcagggacttgagtgaagctggaagtcattatcctcagcaaattaacacaggaacagaaaaccaaacacctcatgttctctcctctaagtgggaactgaacaatgagaacacatggacacagggaggggaacaacacacactgggtcctgtccagggggcaggctgggagagcattaggataaagagctaatgcatgttgagcctaatacctaggtgataggttgataggtgaagcaaaccaccatggcacacatttacatatgtaacaaacctgcatctgtaccctggaacttaaaaaaataaaataaaaaa

SEQ ID NO: 3514 - DNA, 3837 bp, Homo sapiens
  source 1..3837: mol_type = other DNA
accatgtgttgtccacaagaaacccactttaataataaagacacatatgaattaaaagtaaggcaacagagaatgatataccatggtaatactaatcaaaagaaagttggagtagctatattaatttcagacaaagcaaacttcaaagcaaaagagccgattagagataaagaggggcattacataatgttaaaaggtcaatcttccaaggagacataacaatccttattgggtgtgggcctaacaacagagcatcaaaatatataaagcaaaagctgatagaactgcaaggagaaaagaacaaatccactatcatagttggagatttcaacatctctctgttagtaattcatagatccaacaggcagaaaatcagtaacaacgtagttgaattgaggaccaccatcaatcaactggatctagctgacatttatagaatactttacacaacaacagcagaatacactttcttaagcacacatattcactaaaatagacatattctgggccctgaaagataacttaaaattttttaaggaatagaaatcatacaatatgtgctctcagaccaaaatggaattaaactagaaatcaaaaacacaaagataactggaaaatctcaaatacctggacactaaacaataaactctgaaatagtacatgggtcccagaacaattctcaagagaaatttaaaaatattttaaagtaaatgaaattgaaaatacaatgtatcaaaatttgtgagatacaccaaaagcagtacttggaaggaaatttatagcactgaacacatatattagaaaagaaggaagttttaaaatcagtcattcaagcttccaccttagaaaatgagaaaaagagaagtttaaccccaagataagcaaaaggaaaagaattaaaaaattagagcagatatcaatgaagtggaaaacagtaagtcaatggagaaaatcagaaaaatcaaaagctagttctttgaaaagattaataaaattgataaatttcatgacaagcaaatgaaggaaaaaagacaaaaattacaaacatcagaaatgaaagagggggcatcactgctgattccataaggtttaaaggatagcaaagtaatattatgaacaacattctgcccacacatttgacaacctagataaaatggaaaaattccttgaacaacacaatctgccaaaaatcacacaagaaaaaaaaagtaactaaagaggcccatatctattaaagaaatccagaaaactactaataaccttccaaaacagaaagccccaggaccacatgggttcactggtgaattctcccaaacatttaaagaagaaattatactaattctctacaacgtcttctagagacagaagccgggatgggggggtaagtttctaactcattgtataaagccaggattaccctaataccaaaaccaaagagattataaggacgtaagactatcaaccaatatctctcatgaatgtagatgcaaaaatcctcaaaaaatgttagcaagtttacttaaagtacaaaacacttttatatcacaattaaacggaatttattctgagcatacaaggctagttcaacatttgaaaatcaatgtaatccatcaaccacataacaggttaaaaaagaaaaattacataatcatatcaatagatgcagaaaaggcacttgacaaaaatctaacacccattcatggtaaaatctaccaggaaactaagaatagaggggaatttcctcaacttggtaaaaaacatccacaaaaacctacagctataattacagttaatatcacacttaagaaactaggtgctttcctggtaagatcaggaacaaggcaaggatgtctgttctcatcattcctattcaactttgtactgaaagttctagctaataaagacaagaaaaaatagtacacagattgagaagggagaaataaaaccatctttttcacagataaacaattttctctgtaaatcccaaggaagggacaagaacactggaactaataagtaagtattgcaaggttgcaggatacaaagataatatccaagtctattacttttctatgtatcagcaatgaaatagaatttaaaataaaaaacacaacaccatttacattagcagcaaataaatgaataatagttgtacatctaacaaagtatgtacaagttctatgatgaacactacaaaacactgaggaaagaaatccaagaagagctaaataaatactctatgttcatagacagaaaagctaacaattgttgagatttcagttcttctaacttgatctaaagattcagtgcaatcccaaccaaaattacagcaagttattttgtggatatcaacaaattgattctaaagtttctatggagaaacaaaggagccagaataaccaacataattttgaaggagaagaataagtttagaggaataacactatttgacttcgagacttagtataatgtgccattaatcaagacagtgtgttaatagtgaaaaaatatacaaatagaccaatgtaacagaataggcgaggtagaaaatacactcatacaagtataatcaactgatcattgatacaggcaaatcaacagagggaaaggacaatcttttccacaaatgatgctagaacaacagggcatccacatgttaaaaaaaaaaaaaaaaaaaaaaagcatctatatacagaccttacacctttctacccacaaaaaaacccccaaaaccttcaaaatggatcatagactcaaatgtaaaatgcaaaactataaaaatcctggaaaatatattaggagaaaatctaggtaaacttgggtttgccaagaactttttagatacaactccaaaggcacaatccacggaagaaaacattgattgtgctggccttcattaaacttaaaagcttctctgctgaggacacaaagtacaagccacagactgggagtatccaagagatacaaagaacacttaaaactctacaataagaaaatgaacaacccgatttagaaaatgggcaaaagatctgaacggcaccacattaaagaagatatacagatggcaaatgagcaaatgaaaagatgcgccacatcatctgtcattagggaaacagaaatccaaacaacaatgaaataccactacatacatactagaaaagccaaaattgatcctttctattctttttagattttggccattctaatagatacatagtggtatctcattgtattttgatttgtatttaccagtatttgttgttgcaaaaacaaatgctgacaaggatgtggagaaaaggaactctcattcattgctggtggaattacaaaatggtatgtcactttggaagacagtttttcagttccttacaaaactaaacatattctttccatatgatccatcaatcatgctcccaggtattaatccaaatgacttgaaaacttatgtccactcaaaaacctacacatgaaatgtctataacagttatatttataattgcccaaacttggaagccaccaagatgccctctaatgagtacatgaataaactgtagtacattcagacaatggattatttagcattaaaaagaaatgagctatcaagccacaaaaagatatggaagaatcttaaatgcatattgctaagtgaaagaagccaatctgaaaggggtacatactctatgaattcaactatatgacatgttaaaacagataaaaatatgaagacaatgaaaagatcagtgattgccaggggattatgggggcagaatagagaagaaagggattaataggtagactgatgagactttttagggcagtggatatattcactgtatg

SEQ ID NO: 3515 - DNA, 547 bp, Homo sapiens
  source 1..547: mol_type = other DNA
agagtaatgtttttaacacataaggtagatcatgtcgttcctctgcttgaaattctctactggctcctcacttcactcccagtaaaaaaaggaatcctaccaatgactgagtggtttcccatcacctcacaactcctgcagtccactgtagccactctggcatccttgctgctctgtcagcatgccaggctgccccatccaggggccacagcatttgctgtgcagagggagccatatagcttccttcctcttctccatgtctttgcccaaaagtctcctcgaggtccctatcatgctgcactcccccatgcactttggatcttgcttaccctggtctgtatccatttccttcccatagaaaccatcactttctaatgtactgtgcaatttacttatttgctgtgttgattttctgagtctccatccctgatgctagaatagaagttccttgaggactgggatcatgtctactttctttacttctccatcccaagcacatgggctcatggcatcaattggcacatgataaacatcttgaatgcatcaa

SEQ ID NO: 3516 - DNA, 296 bp, Homo sapiens
  source 1..296: mol_type = other DNA
ggtttaacctttctgaaaggcagacactatcacaactgcaaatgtacattcactttgatttagcaattctgaacacaggtatttatactacagttattctcacacaagcgtgaaaagacacatttttgttcaagaatgttcacagcagcattgtttatattagcaaagtactggatgtgacctaaatatcaaccaatagagactagataaattatgtacattcatacaatgaaatactgtatagccacaaaacagaatgaggtagctatgtgtgttggagttgaatgacatccaag

SEQ ID NO: 3517 - DNA, 270 bp, Homo sapiens
  source 1..270: mol_type = other DNA
gatcaggcatggtggcttacacctgtaatcccagcactttggaaggctgaggtgtggggattgcgtgaagccacaagtttgagaccagcctggttagcaaggcaagatccccaactctacaaaaaaataaaaattaaaaaaaaattattaggctgcagaggcaagaggatcccctgagcccagaagttcaagggtatagtgagtcgtgattgtaccactgcattcctgctgagcaacagagtgagaccccatctcaaaaaagaaaaaaaa

SEQ ID NO: 3518 - DNA, 1745 bp, Homo sapiens
  source 1..1745: mol_type = other DNA
agatggacaaagtgggaagtgacttattatacccaagggaatggagttctaagcaggggggtgagttaaatcgtagaccaatttacacaggaaaatctctcgaaggtgcggggtgtgggtgcatggggcatgaagtatagtggtaagctccggagattggctgaacactaatttagatatcagctagatctccaaatcccctaccccaccatgccaaaaactagaggctttttctctggaaggggtgaaattaattctcttgacgcagggaccacaagaaaaactgttaaaagtgaggtattgaatacagttttacttgctaaattttgagacccacccctcctcaatcttgcttagctttgcggaaaaagagcaggcaaatgtttatgcacaaagctggagctaggaagagccttttcaggggattctgcatgatgttctgcacacagtggttctcctggaaggcacagctaacaagcctcactcatgctggcgctcatacaagtgtcagctctttcaccccaacagtcacatatgagcagactgccagggaagttgagataccttcaaaaatacatatttaaaacaaacagaaaaatcataaaataggaactatgcagagagaagaaaacaaacatgaccacattaatactgtggagaaagaagagagatgattttacatccatagaataaataccagatgcaaattaaaagaaatattcagagaataaaaactagctccgagaaattaaaagcataataatagcaatgaattattcattagagacttacatgattaaattgataaaacttttcagaaagtaaaacagaagataaagaaacagaataatacaagagaagaagactaaaggaagaaaccttgaggactagattttagcatctgaataatgagagttgaagaaaaagcaagagtaatgttaaaaaggaggagaaaagcattaaaaattttcaaaagaattgcttagaataaacaataggtttttgatcgaaagatccctaaataaatagatcacaaaatatccagcaaacatgtctaaaaatagaggtatatcaagatatgtcaccacatacaacatgttttctgggagaaagtgaaagcagatttcataaaaaaaaaagaaaaaagaaaagaaaacctctgaaagttttcacacttctcaacagcaacattggagagtagaagataatgaagcaaaaaatcactgtctcaaaaccctgaaggaaaatgatttccaacctagaattctctatttctttactaagtcctattattcactaagtgtgagagtagaataaaaacatataaagatgtgcaaagtgtcagaacataatacctctcattcattctctctatctctgtgtatctggaaagacattttctaccagaaaaggaaataaagtaggagaatgaagaagacaactcatagaggagacaggaatccacggaagagagggacaaaggaaatctcccgcctgaagatggagagagatcccagaagacagctgtgcaaagaaggcagccaggccagattggagcaggtcaaaaactccaggagagatttcttcagtagttgacatattatttcatatgtttgtgtgaagagaagttttatacaaatcggaggagtttggggtttgataagtccatagacaactgagcaaaggaacaaaaaactccaagttcttaacttagggaaaacaaaatgttgtatgtgaatggaaat

SEQ ID NO: 3519 - DNA, 47 bp, Homo sapiens
  source 1..47: mol_type = other DNA
tcggcctgtctagatttccatgtcagtttctgcagggatcaagaaag

SEQ ID NO: 3520 - DNA, 1003 bp, Homo sapiens
  source 1..1003: mol_type = other DNA
taaaaccataatacacagatgattcccaaataacctcttcagcttagacctctctcctggacctcacaaataaccaatgcttagtgggtaggtagctcctcctgaatagacatctcaaacttaggtttaaaaaacctaattctgtatctttctcccccatatctgcctttctcatagtcttctccatcatagtaaatggcaactccattctttgagttgccggcccccaaatttagttctccttgaagcttctctgtcacacctacatccattgtggctgcaatgctgttggctccacctttggaatacctgcaggcttccttcaggtgttcctcctctgtggccctcaaattggccaagccatggtcctctcctgctaggttttcatgccagcttccccactagcattcctgcctctgcccatttctcaacacagcagccaaaacacagcagtgattttttttttaaactaaaccagatcagatcactactttgctcagatgttttcccatcttcttccaataaaagccaaagtccttcctatggcctttgcagccccacatgatctgcactcaggttccaacctctctgacctccaccccttgggcttgcttgaatctgtcaagcatggcatatacttggggtcctttgcaaggacttactctttcatgccttgggatggttctttccccagatagctacatgatttgcttctcatattcttcaggtctctgttcaaatgtcactttctcagtgaagccttttgatccccttatttactttactctttcccacagcactccccacctcttggcagtccttatttttttcttagcatttttcacagtctgacaaactatatgttgtccttgttgattttctgtcttccactagaacataatgccataaggatagacatttttaggctttattcactctggcacctaaagctgtgcctggcacatcatgggccatccataacaagtgtttgctgaatgaataa

SEQ ID NO: 3521 - DNA, 4849 bp, Homo sapiens
  source 1..4849: mol_type = other DNA
tgaaggaacactagcttactcagatgagaaagaccacaacaagaactcggataactcagaaagccagagtggcttctacctccacatgaccacactagttcttcagcaatggttcttcaccaggctaaaatgattgaagtgacagacataaaattcagaacaggaacatagggtaggaaaaaagatcatgaagattcaggagaaagttgaaactcaatccaagaactataaggaataaaataaaatgatacagaagctgaaagatgaaatagccattttaagaaagaaccaaactgacctggtagagctgaaaagctcacttcaagaatttcataatataattgcaagtattaacagcagaataaaccaagctgaggaaagaatctcagagctcaaagaccagttctgcaaaataaaatgatcagacaaaaaaaaaaaagaagaatgaacaaaaactcctagaaatatgggattatgtaaagagaccaaatgtatgactcatcggtgtccctgaaagagtgggagagtaagcaagcaacttggaaaacatatttgaggatatcttccctgaaaactttcctagccttgctagagaggccaacattcaaattcaggaaatgcagaaaatgcctgcaaggtattacaagatgaccatcgacaagacacatagtcatcagattctctaggattgaagtgaaagaaaaaaatattaaaagcatctagagagaagttacaggtcatccacaaagggaacctcatctggctactggtggacttttcagcagaaactctacaagccagaagagattgggggcctatattaagcattatgaaagaaaataaattgcaacggagaatttcatatccagtcaaactaaacttcgtagatgaggaagaaatgagatccttttcagacaagcagatgctgagggaatttgttaccaccagacctgttttacaagaggtcctgaagggagtgctaattatggaaaggaaagaatgttcaactagccaccacaaaaagacacacaactacataaatcagtgacactatacagcaaccacacaatcaagtctacataataaccagctaataacaagataatatgatcaaatctgtacatatcaatagtaacattgaatgtaaatggcctaaatgccccaattaaagggcacaaagtggcaaattgtataaagaagcaagatttactgtctttaagatacttaccccacatggaatgaaacccacaggctcacagtaaagggatggaaaaaaatccactatataaacagaaaaaagcaggggctgctattctaatttcagacaaaacagactttaaaccaacaacaatcaaaacagacaaaaagggcatcacatattggtaaaaggatcaactcaacaagaaaacatagctatcctgtatgtatatgcacccaagacaggagcacccagattcataaaacaagttcttagagacttacaaagagatgtagataaccacacaataatagaggaagatgtcaacaccccactgacaatattagatcatcagagaagaaaataatgaagttatttgggacctcaactccacacttgaccgaatagatctaacaaacatctacagaactctccacctccccgccccctcccccaaaaaaccacaacagaataataaggaaattccttgaaagtgatgagaacaaagataaaacatatcagaatttctgggacctacctaaaacattgttaagagaaacatttataacactatatgcccacataaaaaaaagttagaaagatctcaaattcacaacctaacatcacacctagagaaactagaaaatcaagagcaaatcaaccccaaaggtagcagaagataagacataaccaaaatcagacctgaaatgaatgaaactgagaaaaaaatgttacacaaaggatcaacaaatcttggaggtagttatttgaaagaataaataagattgatataccactagctagattaataataaaagagagaggaacccaataaacacaattggaaataacaaagaggacattaccactgacccccaagaaatacaaaaatccctccgagactactacaaacacctctatgcacacctctatgcactagaaagcctagaagaaattgataaattcctggaaacatacagtctcccaaggtgagaaaaggaagaaattgcaatcctgaacagactgataatgagttccaaaattgaatcagtaataaaaacactgcgaaccagaaaaagctgagtaccagatggattcacatctgagttctatcaggtgtataagaagagctggtaccaatcctactgaaactattccaaaaaattgaggaggacagactcctccctaacttattctatgaggacagcatcatcctgatagcaaaacctggtagagacacaacaaaaaaagaaaactttgggccaatatccttgatgaacattgatgtaaaaagtcatcaacaaatttcaaacgaaccaaatccagcagcacacgaacaaggtattccaccatgatgaggtaggctttattcctggatgcaggtttgtttcaacatttgcaaatcaataaatgtgattcatcacataaatagaactaaaaacatgaaacctaattatctcaataaatacagaaaggcttttaataaaattaaatattccttcatgttatgaaccttcagcaaactaagcactgtaggaacatacctcaaaataataagagccatctataacatacccacagccatatcatagtgaacaggtaaaagctggaagcattccccttgagaactggaacaagacaaggatgaccactgtcaccacttccattcaacacagttctggaagtcctagccagagcaatcaggaaggagaaataaaaggcatccaaataggaagagaggaagtcaggctttctctgcttgcagacaatatgattctatacctagaaaaccccatagtctctgccccagagctcgtagatcttacaaacaactttagcaaagtttcagaatgtaaaattagtgcacaaaaatcagtagcatttgtatacatcaacagtgtccaagctgagggtcaaatgaagaaaccaaccccattcacaatagccacaaatagtgcaaaatacctaggaatgcagctaaccagggaggtgaaagatctctacaatgagaattacaaaatactgctgaaagacatctgagatgactgataaaatggaagaacatttcatgctcatagataggaagaatactgttaaaatggccatactgcccaaagcaacttatagattgaatgctattccaaaccaccaatgacattctgcacagaaatagaaatacctattgtataaagcatatagaacgaaaaaaagccccaatagcccaagaaatcctaagcaaaaagaacaaagctggaggcatcgcactacctgactttaaactatactataagcctacactaatgaaaacagcatgttagtggaaaaagaaaaaaaaaaaaagaacagacacatagaccagtggaacagaatagagagcccagaaataaagccagatacctgcaaccatctaatggacataactgacaatgagcaataagaaaaagacttcctattcaataaatgctgctaggataaattggccagccatatacagaagattgaaactggatcccttccttacataaatcaactcaagacaaatggaaaacctaagactataaaaaccctgatgataacctaggaaattgtattccagtcataggctctggtaaagatttcatgatggagacaccaaaagcaattgcaacaaaaacaaaaattgataaaggggaccacctaattaaactaaagagtttctgcacagcaaaataaaatagagtaaacagacggcgtacagaatgggagaagatatttgtaacttatgcatctgacaaaggtctaatgtagagaatctgtaaggaacttaaagtagcaagcaaaaaacaaccccattaaaatgtggcccaaagacatgaacagacacttttcaaaagaagactgtgcacagccaacaatttatgaaaaagtacttaacatcatgaatcattagaacaatgcaaatcaaaaccacagagagacactatctcacacctgtctgaatggctgttattaagaagtcaaatagtaacagatgctggtgaggctgtggagaaaaaggaatgttatacactgcttgttgggatgaaaattagttcagccattgtagtaagcagtgtggcgatttcccaaagaagttaaagcagaagtgtcattcaacccagcaatcccattattgggtatattcccaaaggaatgtaaatcattacaccatattcatcacaacactgttcacaatagcaaaaacgtggaatcaacctaaatggccattagcagtagactggttaaagaaagtgtggcagatatacactgtggcatactatgcagccattaaaaagcacaagatcacgttcattgaagcaacatgaatggagctggaggcgattatcctaagtgaactaaagcaggaacagaaaaccaaccctcatgttctcacttataagtggaaggtaaatattgagtacatgtggacacaaagaagggaacaacagacactgggacctatttgagggtgtagggtgggagaagggagatgatcaaacaactacctattgtctactatgcttcttacctgggtgatgaaataatctgtacaccagacccccatgacactcaatttacctatattacaaacctgcatatgtacccctgaacctgaaataaaagttggaaaca

SEQ ID NO: 3522 - DNA, 1309 bp, Homo sapiens
  source 1..1309: mol_type = other DNA
gcttagacaatattcttttgtgcactcctttttagttatccccacgtgcccagttcccttattaggtctaggcattttaactaacttatctgctttcctgactattcctaggctacagccacaactcattgccgcccttttccccagttcaaagcctccttcacatcctccccttgtgtctccccatcttaatccacaagtatgagacacctctattcctaccttggcgaatgatcatgcaccccttaacatcccattaaaacctaatcacccttaccccactcaatgccaatatcccatcccaccgcatgctttaaaaggttaaagcctgttatcactcacttgctacagcatgggcttctaaagcatataaactctccttacaattctcccattttacccatccaaaaaccagacaagtcttacaggttggttcaggatctatgccttatcaaccaaattgttttgcctgtccaccctgtagtgcccaacccgtacactcttgtcctcaatacctccctccacaacccatttttctgttctggatctcaagcatgcttcctttactattcctttgcacccttcatcccagcctctctttgctttcacttggactgaccctgacacccatcagtctcagcaacttacctaggctatactgccacaaggcttcaggaacagcccccattacttcagtcaagccgtttctcatgatttactttctttccatccatctgcttctcactttattcaatattttgacaaccttctactttatagcccctcctacaaatcttcccaaaaggacacccttctgctcctccaacatctgttctcaaaagaatatcgcgtatcctccttcaaagcccaaatttcttcctcatctgttacctatctcggcataattcttaataaaaacacacgttctctccctgctgatcgtgtctggctaatctcccaaaccctaaccccttctacaaagcaacaactcctttccttcctagcatggttaggtactttcacctttggatacctggttttgccatcctgactaaaccgttatataaactcacaaaaagaaacttagctgacctcatagatcctaaatcctttccccactcctctttcctttccttaaaaacagccctagaagctgcttccacactagctctccctaactaatcccaacccttttcattacacacagccgaagtgcagggctgtgcggtcagaattcttacacgagagccgggaccgtgccctgtagcctttctgtccaaacaacttgaccttactgttttaggctggc

SEQ ID NO: 3523 - DNA, 389 bp, Homo sapiens
  source 1..389: mol_type = other DNA
agagtggagttgcatcatactcaggggttagcttccaaggtcagtacataggtaaaatgggctattaggatgatccttgaaagccctttagaagggtgccatgttggaaacctgtacatccacaacaagtagcttttcctcctatgttggaaaaaaagactgtttctttgtttgaagaccaagtgaagttgttggtgtttgtttaggggccattttgttaaaaaaaaaaaaaaaaaagcacataacttttaacactagaatcagcccgcaagatgcttgccccgctagtggcagatgtgaactgacaaggagtgaagcgcccacccagcggatggacagcacccacctgggtttactcaagggtgtgcattcattttaggtgggatcgc

SEQ ID NO: 3524 - DNA, 109 bp, Homo sapiens
  source 1..109: mol_type = other DNA
gaaagcccatggactttaagatcagagagctttggtcttgaatttcagctccttagataaagtggcccatcctctgagatcttcagtttctgcttctataaaacaggaa

SEQ ID NO: 3525 - DNA, 149 bp, Homo sapiens
  source 1..149: mol_type = other DNA
tttgatgttagaccaatgtggggtcaaattctggctcagccaccgaccctgagtgaccttttaagttacttaacttttcccacgtttccttttcctcatctgtaaaatacttcccttaacaattttgtaaagatcaaaagagagaatgc

SEQ ID NO: 3526 - DNA, 308 bp, Homo sapiens
  source 1..308: mol_type = other DNA
gcccggtgcagtggctcacgcctgtaatcccagcactttgggaggccaaggcgggtagatcacctgtggtcaggagttcaagaccagcctgaccaacatggaaaaacccagtctctactaaaaatacaaaaattagctgggcgtggtagcggctcctgtaatcccagctactcgggaggctgaggcaggagaattgcttgaacccaggaggcggagattgcagtgggccgagactgcaccattgccctccagcctgggcaacagagagagactctgtctcaaaaaaaaaaaaaaaaaaaaaaaaaaaa

SEQ ID NO: 3527 - DNA, 251 bp, Homo sapiens
  source 1..251: mol_type = other DNA
aacaagatgacatttgtagacaacctgatccatcaggatgtggagagatctggacaaatggcaaataatttggggttgaattatggcccagagaagtaagcaaatgaaaaactaaacaattataaatgtatctgggaagcaaaggtattcataatatgtcccatggccagctgcgagcagtatttaactagacatgctgttgtcaatattgaacatgaatcaagccaaatactgatatagctattgagaga

SEQ ID NO: 3528 - DNA, 293 bp, Homo sapiens
  source 1..293: mol_type = other DNA
ggctgggcaaggtggcttacgcctataatcccagcactttgagaggccgaggcgggtggatcagtagaggctaggagtttgagaccagcctggccgatatcgtgaaaccccgtctttaccaaaaaatacaaaaattagcccagtgtggtggcaggcacctgtaatcccagctattagggaggctgaggcaggagaattgtgtgaacccaggaggcagaggttgcagtgagcctagattgtgccactgcctgggcaacagtgagatcctgtctacaaaaaaaaaaaaaaaaaaa

SEQ ID NO: 3529 - DNA, 304 bp, Homo sapiens
  source 1..304: mol_type = other DNA
ccgggcgcggtggctcacccctgtaatcccagcactttgggaggcctaggcgggcggatcacctgaggtagcgagttcaagaccagcctgaccgacatggagaaaccttgtctctactaaaaaaaatacaaaatagccgggcgtggtggcgcatgcctgtaatcccagctactagggaggctgaggcaggagaatcgcttgaacccgggaggtggaggtcgtagtgagccgagatcgtgccattgcactccagcctgagcaacaagagcgaaattccgtctcaaaaaaaaaaaaaaaaaaaaaa

SEQ ID NO: 3530 - DNA, 305 bp, Homo sapiens
  source 1..305: mol_type = other DNA
cgggcgctgtggctcacacctgtaatcccgcactttgggaggctgaggcgggcagatcacaaggtcaggagttcgagaccagcctggccaatgtggtgaaaccccatctctactaaaaacacaaaaattagccaggtatggtggcgggcgcctgtagtcccagctactcgggaggctgaggcaggaaaatcacttgaacccgggaggtggaggttgcagtgaactgagattgtgccactgcactccagcctgggggacagagtgagactctgtctcaaaaaaaaaaaagaaaaaaaaaggaaaaa

SEQ ID NO: 3531 - DNA, 708 bp, Homo sapiens
  source 1..708: mol_type = other DNA
tgagaggtgaagccagctggacttcctgggtcaagtagggactcggagaacatttctgtctagctagagattgtaaacgcaccaatcagcactctgtaaaaacacaccaatcagcgctctgggtctaggtaaaggattgtaaatgcaccaatcagcactctgtgtctagctaaaggattgtaaatgcacaatcagcactctgtaaaaacgcaccaatcagtgctctgtgtctagctaaaggattgtaaatgcaccaatcagcactctgtaaaatggaccaattagcactctgtaaaatggaccaatcaagcactctgtaaaatggaccaatcagcaggatgtgggcagggacaaataagggaataaaagctggccaccccagccagcaggggcaagctgccagggtccccttccaccctctggaagctttgttctttcattcttcacaataaatcttgctgctgctcactctttgggtctgcaccacctttaagagctgtaacactcgccgcgaaggtccgcggcttcattcttgaagtcagcaagaccatgaacccaccggaaggaagaaactccggacacatctgaaggaacaaactccagacacaccatctttaagagctgtaacactcaaccgtgaaggtctgcatcttcattcttgaagtcagcgagaccaggaacccaccggaaggaaccaactctggacac

SEQ ID NO: 3532 - DNA, 192 bp, Homo sapiens
  source 1..192: mol_type = other DNA
gggagacaccattgtgggagtgagaaaatcctggacttggagggaactgactagggatcacctcccagctctgccatggacccactgtgtgaccatgggcaagttacttgacctctctgagcctcagttatcttatcagtgaaactgggttaataatatatctctcagtggcacaggaggatcacatagggt

SEQ ID NO: 3533 - DNA, 277 bp, Homo sapiens
  source 1..277: mol_type = other DNA
ggccaggcgcggtggctcacacctgtaatcccagcactttgggaggccgagatgggtggatcacctgaggtcaggagttcgagaccagcctggtgaaactccatttctactaaaaatgcaaaaattagctgggcgtggttgcgggtgcttgtaatcccagctactcaggaggctgaggcaagagaatcgcttgaacctgggaggtggaggttgcagtgagccgagaacatgccattgcactccagcccgggcaccaaaaaaaaaaaaaaaaaaaaaa

SEQ ID NO: 3534 - DNA, 127 bp, Homo sapiens
  source 1..127: mol_type = other DNA
agaaagaacatatttccacatcggcctgggacaggtctggtttatgccttttgatctggtgtaattaatagcatcccctttctctctcaatagtcccaatttgggcaacgaattatatggtgattct

SEQ ID NO: 3535 - DNA, 151 bp, Homo sapiens
  source 1..151: mol_type = other DNA
agatacggacttattgtgacgctaaggaagcttaatcttcagggccccttccaagaccctgtacctaattttatattaacattgtttttcttaaagaagtctttctaaataattcaagctttcagccccataaaatttagatccacccctg

SEQ ID NO: 3536 - DNA, 309 bp, Homo sapiens
  source 1..309: mol_type = other DNA
gccgggcgcggtggctcacgcctgtaatcccagcactttgggaggccgaggcgggcggatcacaaggtcaggagatcgagaccatcctggctaacacggtgaaaccccgtctctactaaaaatataaaaaattagccgggcgtggtggcgggtgcctgtattgccagctactcggaaggctgaggcaggagaatggcgtgaacctgggaggtggagcttgcagtgagcggacatcgcgccactgcactccagcctgggcgacagagcaagactccgtctcaaaaaaaaaaaaaaaaaaaaaaaaaaaaa

SEQ ID NO: 3537 - DNA, 152 bp, Homo sapiens
  source 1..152: mol_type = other DNA
gtgaccttgggccagtcatttcagttctgtagctcagttttccccgtgtaagatggggaggataatatgaccagcttaagggcggtcaggaatattcaatgagaaaggtgtgtacggcaagttacagagcgcctgcccggccgccagcgctc

SEQ ID NO: 3538 - DNA, 62 bp, Homo sapiens
  source 1..62: mol_type = other DNA
gatagtgatgatagttgcatggccttggatatgctaagaactactgaagtgtatgctttaaa

SEQ ID NO: 3539 - DNA, 113 bp, Homo sapiens
  source 1..113: mol_type = other DNA
gagcccaggagttcgaggctgcaatgagccaatactgcacctttgtgcttctgcctgggcgacagagtgagaccttgtcgataagaaaaaaaaaaacctgaaaacagaaaaga

SEQ ID NO: 3540 - DNA, 296 bp, Homo sapiens
  source 1..296: mol_type = other DNA
gccgggcgcagtggttcacgcctataatctagcactttgggaggctgaggcaggtggatcacgtgaggtcagaagttcgacaagcctggacaacatggtgaaaccctgtctctactaacaatacaaatattagccagctgtggtggcgcacgcctgtaatccaagctacttggaaggttgaggcaggagaatcacttgaagctgggaggtggaggttgcagtgagtggagatcacaccactgcactccagcctgggtgacaaagcaagactccatctcaaacaaacaaacaaaaaa

SEQ ID NO: 3541 - DNA, 311 bp, Homo sapiens
  source 1..311: mol_type = other DNA
gctgggcacagtggctcatgtgtataatcccagcactttgggaggccgaggcgagtggatcacttaagatcaggagctcgagaccagcctggccaaataatgaaaccctgtctctactaaaaatacaaaaattaactgggcatggtgtggtgcacctgtaatcccagctactcgggatggtgaggcacgagaatcgcttgaacctgggaagcagaggttgcagtgagccaagatcgcaccactgcactccagcctgggcaacagagtgagacttcatctcaaaaaaaaaagaaaagaaaagaaaaaacaaa

SEQ ID NO: 3542 - DNA, 193 bp, Homo sapiens
  source 1..193: mol_type = other DNA
ccagcctgggcaacatggcaaaaccctgtctctataaacattaaccgagtgtggtggcacgtgcctatagtcccagctactcaggaggctgaggtgggaggatcacttgagcctgagacaccaaagctgcagtgaactgtgattacactactgcactccagcctgggtggatagaccgagaccctatttgaag

SEQ ID NO: 3543 - DNA, 36 bp, Homo sapiens
  source 1..36: mol_type = other DNA
ttgatgccaggagagtaacactgcctttggccacac

SEQ ID NO: 3544 - DNA, 170 bp, Homo sapiens
  source 1..170: mol_type = other DNA
tcaatcaggttgactcctgcttatgcttcctaactcaatttttccacctttcctaaacccccaggtgggttgggtgcccttcactgtgctcccaaagagctccattcttgcccatattgcataacacaataccatgttgtgatttgtgtcttatgtccgtctccccaacc

SEQ ID NO: 3545 - DNA, 165 bp, Homo sapiens
  source 1..165: mol_type = other DNA
gacaagccagtacactgaggacagaaaagcagaaatagggaaagaaatctgggttccttttatttttgagccatagaaatagtatcttaggacttatttctagatgcagtttctttaatgtaagccaattctggttatttctacttggagctgaaagcaacctga

SEQ ID NO: 3546 - DNA, 197 bp, Homo sapiens
  source 1..197: mol_type = other DNA
gaggatccattcgaatgcaggaagaactattagaactttgacttagatttattttcatctcatcttttttaaatttctatttttgtgtatgttttataatgtacataatattttagtacagtagtacatgtatataatttacaaataaataattatacaattaaggaagtgaactaaacatttttttactgatggga

SEQ ID NO: 3547 - DNA, 5216 bp, Homo sapiens
  source 1..5216: mol_type = other DNA
aaatagcagataggaggcaggattaacttgcagctcccactcgaatggacagagcagcatgtggagactcacatcatgaacttttgctccaagaactactgcaggaacatcccaggaaagctgagagaatccacacaccctttgaaggaagcggcttgctgctgccggccccatgagacagctgagaaactccgagtgcccaaagtgtgagagggggaaagtctgctcccgagcactcatcctcactgcggaacctgaaggtccagatcacaggagaaggatttgaccttacctagagctgagatgaactgagagagtcaagtgaaatgcagaggtagaggaagcagcgggaagagtcctgtgggcactcttggtctccagggaagccattcctgactttgtttcacaggggtccttggagagagctgccagtggaattggggaaagaccacagggagaaggaaacttccaattgaactttgtaacaattttgaccaaacgtgaggtttcctggacagaatcccggggaaggggtgaacagggagtgtagctatgagcatagaaactgcgccaggtggggaggcatggaacctgacagccctgcttgctttctcaacagggaggcttgtagcctgaggcaagttctcagcctgctcaccggctgcctggaaataaacttgctgctgttgggggcccacggtaggagtgagactagctttcgagctgcatgggagctgggtgaggcctgtcactgctggcttttccccacttccttggccacctgtatgacacaggagaagcagccataatcctcctgggaatgtaactccgttggcctgggaaccacacccccatcctccacagcagccacagcaagccctgcccaaggagagtctgagctcagacacgcctaacactgccccccacctgatggtctttttctacccaccttggtagctgaagacaaaagacataatctcttgggagctctatggccctgcccaccacctgagaaatcctaatacatatccaggtgaccctagagtaagcttgtatcctccctatactaccacaactgatgctgtcttgaaagcatcacctcccagctggaggccaaccaacacaaaaccagcacattaagcaaaactaccatcaaggaccctcacagaatccacttcactcctttgctacctccactggagcaggtgctggtatccacagctgagagacctgaagatggatcacatcacagggctctttgcagacactccccagtaccagaccatagcctagtaggtccactgggtggctagacccagaagagaaataacaatcactgcagtttggctctcaggaagccctatccctaggggaagggggagaacaccacatccagggagcacgcggtgggacaaaagaatctgaacagcagcccttgagccccagatcttttctctgataatagtctacccaaatgagaaggaaccagaaaaacaattctggtaatatgacaaaacaagtttctttaacacccctaaaggatcacattagctgatcagcaatggattcaaaccaagaagaaatcactgaattaccagaaaaagaattcagaagatcaattataaagctactcaaggaggcaccagaaaaaggtgaataccaacttaaagaaataaaaaaatgatacaggataaaaatttccagagaaatagcctaaataggaaacaatcacagcttctggaaatgaaggacacagttagaggaatgcaaaatacactggaaagtctcagcaatagaataaaacaagtagaagaaagaacttcagagcttgaaaacaaggcttttaaattaacccagtcagacaaagacaaagaaaaaagaaaaaaaatgaacaaagcctccgagaagtttgggattatgttaaactgccaaacctaagaataattgatgttcccaaggaagaagagaaatctaaaagtttggaaaacatatttgggggaatagttgaggtaaacttccctggtcttgctagagagctagacatccaaataaaagaagctcaaagaacatccaggaaattcatagcaaaaaggtcatcacctaggcacatagtcgtcaggttatctaaagacaagatgaaggaaagaatcttaagagctgtgaggcaaaagcatcaggtaacctataaaggaaaacctatcagagtagcagcagatttctcagcagaaacctataacctagaagggattggatcctgttgttagcctccttaaacaaaacaattatcagccaataattttgtattcagcaaaactaagtttcataaatgaaaaagatagtctttttcagacaaacaaatgctcataattcaccactatcaagccagcactacaagaactgctaaaaggagctctaaatcttgaaacaaatcctcaaaatacaccaaaatagaacctccagaaaacataaatctcacaggacctatgaaacaataacacaatgaaaaaaaccaatgaggtattcaggcaataactagcaagatgaatagaatagtagtacctcacttctcaatactaatgtaaatgccataaatgctccacttaaaagatacagcaaggcagaatgcataagaatccaccaaccaagtatctcttatcttcaagagactcaccaacacataaggactcacatacatttaaggtaaaggggtggaaaaagatattccatgcaaatgaacaccaaaagcgagcaggaatagctgttcttatatcagacaaaacagacttgaaagcaacaaccattaaaaaagacagagggatattatataatgataaaaggactagtccaacaggaaaatatcacaatcttaaatatatatgcatctaacactggagctcccaaatttataaaacaattactagtagacattagtaatgagatagcaacaaaataatagtggaggactttaatactccagttacaggtcgtcaagacagaaagtcaacaaagaaacaatggacttaaactataccctagaacaaatagatttaacagatatttacagaacattctacccaacaactacagattatacattctattcatcagcacattgaacattctccaagatagaccatgtgacaggccacaaaacaagtcttgataaatttaagaaaattgaaattatatcaagtactctctcagaccacagtggaatgaaattggaaatcaactctaaaaggaatcttcaaaaccatgcaaatacatggaaattaaataacctgctcctgaatgatcattgggtcaacaataaaatcaagatggaaattaaaaaattcattgaagtgaaagataatcgtgacaaaacttctgggatccagcaaaagtggtgccaaaaggaaagttcctagcattgaatgcccacagcagaaggtctgagagagcacaaatagataatctaagatcacacctcaaggaactagataaacaagaacaaaccaaacccaaactcaacagaagaaaataaataaccaagatcagagcagaactaaatgaaattgaaacaaaaaaattacagaagataaatgaaacaaaaagctggttctttgaaaagataaacaaaattgataaaccattagtgagattaattaagaagagaagagagaagatccaaataagctaagttagaaatgaaacaggagatgttacaactgataccacagaaatacaaaagatcattcaaggctactatgaatacctttatgcacacaaactagaaaacctagaggagatggataaattcctaggaatatacaactattttagattaaaccaggaagaaatagaaattctgaacagaccaataacaagcagtgagatagaaatggtaataaaaaaattgccaacaaaaaaattccaggaccagatggatgcattcacagctgaattctatcagacattcaaagaagaattgatatcaatcctatcgacactatttcaaaagatggagaaagagggaatcctccctaaatcattctataaagccactatcagcctaataccaaaaccaggacacgacataacaaagaaagaaaactacaggccaatatccctaattaacatagatgcaaaaatctgtaacaaaatactacctaacctgatccatcagtatatcaaaaagataattcaccatgatcaattaggttttataccagggattcagggatggtttaacatatgcaagtcaataaatgtgatataccacataagcagaattaaaaagaaaaatcacatgatcatctcaatagatgcagaaaaagcattggacaaaatttagcatccctttatgattaaaaccctcagcaaaaatgacatagaaggaacatacctcaaggtaataaaagccatctacgacaaacccacagccaacattatactgaacagggaaaagttgaaagcattcccccctgagaactagaacaagacaaggatgcccactttcaccacttctattcaacatagtactggaaatcctagccagagcagtcagacaagagaaagaaagaaagggcatccaaatcagtaaaaaggaagtcaaactgtcactgttctctgatgatatgatagtatattcagaaaactctaaagactcatcccaaaagctcctagcactgataaatgagttcagcagaacttcaaaacacaaatcagtagtactgctatacaccaacagtgaccaagctgagaatcaaatcaagaactcaaccccttttacaatagctgcaacaacaacaaaaaatgaaataaaatacttaggagtaaacctaaccaaggaggtgaaggacctttacaaggaaaactacagaacactactgaaagaaatcatagacaacacaaacaaatggaaacccatcccatgctgatggatgggtagaatcagtattgtgaaaatgaccgtgtggccaaaagcaatctacaaattcaatgcaattcccatcaaaataccaccatcattcctcacagaattggaaaaagcaatcgtaaaattcatgtagaatcattattgtgaaaatgaccgtgtggccaaaagcaatctacaaattcaatgcaattcccatcaaaataccaccatcattcctcacagaattggaaaaagcaatcgtaaaattcatatagaaccaaaaaagagcccatacagccagagcaagagtcagcaa

SEQ ID NO: 3548 - DNA, 299 bp, Homo sapiens
  source 1..299: mol_type = other DNA
gggcacattggcttatgcctgtaatcccagaattttgggaggctgaggagggaggatggcttgagcccaggagttcaagatcagcctgggcaacttggcaaaatctcatcgctgcaaaagattagccaggcatggtggcatgcacctatagtccaagctacttgggaggctgaggtggaaggatccgttgagcccaggaggcagaggttgcagtgagccaagattgtgccactgcactccagcctgggtgacaagagtaagaccctgtctcaaaaaggaaaaaaaaaaaaagaaagaaa

SEQ ID NO: 3549 - DNA, 307 bp, Homo sapiens
  source 1..307: mol_type = other DNA
ggctgggtgcggtggctcatgcctgtaaatcccagcaatttgggaggctgagtggggtggatcacgaggtcaagagatagaccatcctggccaccatgatgaaacccgtctctactgaaaatacaaaaattagccgaacgtggtgacatgcaactgtagtcccagatactctggaggctgaggcaggagaatcgcttgaacctgggaggcggaggttgcagtgagctgagatcgcgccactgcactccagcctgggcgacagagcgagactccgtctcaaaaaaaaaaaaaacaaacaaaccaaaaa

SEQ ID NO: 3550 - DNA, 44 bp, Homo sapiens
  source 1..44: mol_type = other DNA
tattaatggagttattgctatttttgctgtgataatggtattat

SEQ ID NO: 3551 - DNA, 333 bp, Homo sapiens
  source 1..333: mol_type = other DNA
ggccaggtgctgttgctcacgcctgtaatcccacactttgtgaggccgaggcgggcggatcacctgaggtcgggagcttgagaccagcctgaccaacatggagaaaccccgtctctactaaaaatacaaaattatccgggcgtggtggcgcgcgcctgtaatcccagctactcaggaggctgaggcaggaaaatcgcttgaacccgggaggtggaggttgtggtgagccgagatcacaccattgcactccagcctggacaacaagagcaaaactctgccaaaaaaaaaaaaaaaaaaaaaagaagaagaaagaaagaaagaaagaaagaggga

SEQ ID NO: 3552 - DNA, 275 bp, Homo sapiens
  source 1..275: mol_type = other DNA
cctagcattttgggaggctgaggcaggcggattgcttgaggccagcagttcaagaccagcctgagcgacatagtgagatcctgtctctacaaaaaaaaaaaaaaatgtgttttcattagctgggtgtgttggcatgcacctgtggtaccagctacttgggaggctgaagtgggagaattgcttgagcctgggaggttgaagctacagtcagctgtgattgcaccactacacttcaaccatggcaatagagtgagaccctgtctcaaaaaaaaaaa

SEQ ID NO: 3553 - DNA, 323 bp, Homo sapiens
  source 1..323: mol_type = other DNA
ggccaggcgcggtggctcacgcctgtaatcccagcactttgggaggccgaggcgggcggatcacgaggtcaggagatcgagaccatcctggctaacacggtgaaaccccgtctctactaaaaatacaaaataattagccgggcgtggtagtgggcgcctgtagtcccagctattctggaggctgaggcaggagcatggcgtgaacctgggaggcggagcttgcagtgagccgagattgcgccactgcagtccagcctgggtgacagagcaaggctacgtatcaataaataaataaataaataaataaataaataaataaataa

SEQ ID NO: 3554 - DNA, 282 bp, Homo sapiens
  source 1..282: mol_type = other DNA
ttcggctttgtctttgtagccacagattgaaaactaataccagtggttggatgaaagaaagagaagactttaatagaacttttaaacaattaagggaagttcagaaatagagtgaacagtcctgtgatttctccattactggaagtgctcacataaaggtgctgtcacctggcagggtttggagttgggctcaggggacaggactgctgccctggagaggggtccgggagatgaccttggggctgttcccctttccctgtggactctggctttctctgagtc

SEQ ID NO: 3555 - DNA, 567 bp, Homo sapiens
  source 1..567: mol_type = other DNA
caggaggctcctaattttcctgtttggctttcaaacaacccacacttctgtgcattatatactgatatcctgaacgacttcctatgctgattctggatatacatacacagcagatgaatggacatttgcagctatcagactgtgctggtgctgatttgtgtagtaatttgaccatcttggtgtattttttcttcatatttcttaaatagaaaatgaaaaaaatcaaatggctgatatcataaaaacaactggtctctaaatttaagattgagacaagaatagaaatcaggagaaatgaggaatctttaatttcaactgactgaatgctcacaggactcaaaccagttggtgcattcaactgagaaaaagaacaaatgagaacatgcagaaaacactggaaataaattatctaaaattatgtctaaaaattgaagcataattaggaattccagaatgatttaagatctctacaactcctctctacttttttagtccattatcttttacagaaccaatgttcaaatacatttttaggaatgtatttagtaggatataagaggacttctt

SEQ ID NO: 3556 - DNA, 102 bp, Homo sapiens
  source 1..102: mol_type = other DNA
aaggagaacaggatgcttcaaggtgacagtcatccgggttctggtgcagatcaactttccacgtgtgccatcttggacaagtcattatctagctgggcctca

SEQ ID NO: 3557 - DNA, 320 bp, Homo sapiens
  source 1..320: mol_type = other DNA
ggccaggcgcggtgactcacacctgtaatcccagcactttgggaagctgaggcgggcggatcacctgaggtcaggagttggagacgagcctgaccaacatggtgaaagcccgtctctactgaaaatagaaaaacttagccggacatggtggtgcatgcctgcagtcccagctactcgggaggctgaggcaggagaattgcttgaacctgggaggtgaaggttgtaattagcctagatctcgccactgcactccagcctgtgtttctgtctcaaaaaaataaatcctccctcccgccaaaaaaaaaaaaaaaaaaaaaaaa

SEQ ID NO: 3558 - DNA, 1067 bp, Homo sapiens
  source 1..1067: mol_type = other DNA
aaaaagacaggaccaggcacagcctgaactgtccccgctggccagcctggaacaatcggagcaatccagtcaatcatgataataacagatcacaatcagcagaatcaaataaggacccatgagcctgttctgaacaattaagtcaatgagaagggaaagctcttccttacagtaggacttaaactacaaaagtggaataagcggaagaatttaaaaattaccatttgacgaacaccacactagcaactggttcaggcaaaaatcatgaatgagtacaaaattaatgggtaaaagtgtgatgaggaataagatatttacatactttcacagagaatctcaagacacttcattacaaagaaaaaagttatcaatttgacaatggagttggcggacaccatcttaactatgtgaccaaagtttatgtcatcacccataggacaggcatatcaacaccttgcctgacaaaatgcacagagagcacaataccacccttcagtagtattcccacccacatcacaaggaaataccacacaaatccaaatcaagggtcgttcagcaaacttgctagaattaactagattgtattcttcaaaactgtgaaggtcctgattgacagactgaatagctcttccagactaaaaaagactaaagagggctgcaattaaatgcaacgtgtgctcctggaatggatactgcacgaaatagagaacattaatgggcacctggcaagatctgaataaagtctgtaaattagataacagcattgaatgaatgtggtattcccaattttcatcattttacttccagaagagaatgtccttggtttaaaaaaaaaaatacactgaaatatttaaaggtaaaagaagtattatgtctgccttaattataaatgtttcagaaaaaaaaagtttatctaggtgatacatgtgcaaatacagaaagaagggtataagtggtataacaaacggcaaaatattaacatgtaagatatctgggtaaaaggtatatagaaatctttgtgtaatttttgtaaccatttttaagtctgaaattgtttcaaaattaaa

SEQ ID NO: 3559 - DNA, 61 bp, Homo sapiens
  source 1..61: mol_type = other DNA
tccccagtatccagtacagtgcctagcacacagtaggcaccttaatagtcattgaacagat

SEQ ID NO: 3560 - DNA, 168 bp, Homo sapiens
  source 1..168: mol_type = other DNA
cctgctccttaatgtatggcgggtaaggcagcagtattgtcagcacctgcacctgggggggacctgatggaactgcagaaactctgcccccaacccactgaatcagaatctccattcaaaccaggtccccagatgatctgcaagcacttcagtgttggagaagcactg

SEQ ID NO: 3561 - DNA, 500 bp, Homo sapiens
  source 1..500: mol_type = other DNA
tgttggtagataattctccgtgggtctcttgcaattctgtacatgatttaagcagaggcaatgactatctttgttctggactatcattacaaggatatttttatagtgaatagacttagagaatagtgtcttcctccagagcaaagggcaggtatgcttacagacttggaagacagagacagcatctcccttaagaacaaaaagcaggcatgcttgcagtccagtataagagattcgggtaccttatattcagggttcctttcctgcaatgcaacccactgtgtgtgcacaactggccttctgcaagtcgctctgtgagaatcagggcttgaagaactggtgcaaaaaacaaatgctgatatcatgactactgttaccactgtgaataataaagtcctctgtctgacccaggagtctcatgtcttttgctagcaaactaaggcaggttaacctagcttgcaaatagagtaaagaagctcagacccttcatagttcttggc

SEQ ID NO: 3562 - DNA, 73 bp, Homo sapiens
  source 1..73: mol_type = other DNA
tgttaaatgaaaaggttggaccagatgatctgaaatctctgctcttcaacctctaaaactctgattgtatact

SEQ ID NO: 3563 - DNA, 263 bp, Homo sapiens
  source 1..263: mol_type = other DNA
gccgggtgcggtggctcacgtctataatcccagcactttggaaggctgaggtgggcaaatcacctgaggtcaggagtgtaagaccagtctgaccaacgtggtgaaaccctgtctctacaaaaatacaaaaattaaccaggcatgatggcaggtgcctgtaatcccagctacttgggaggctgagatgggagaattgtttgaacctgctgcattccagcctgggcaacagagtgggactcaaaaaaaaaaaaaaaaaaaaaaaa

SEQ ID NO: 3564 - DNA, 318 bp, Homo sapiens
  source 1..318: mol_type = other DNA
cccttcccttccccgtgaatccccagcctgaggtcgtgcttaagtgccacctgctcaagagagaaggcttcctgcccgcgcccatgatgtaagtccccccagatgctttccaccatcctgtcctttgtctgtaattgcgcttgtcgcttgaacagaatcctaattgtgctgattacatgtttaattttggtctcccctgtaagacaggcatgctttttggaggcagggactgaatgtcattcacatctgtgctcctagggtctaatacatgatggtgcattgtaagtattcagtatataacttgttgaataaatggat

SEQ ID NO: 3565 - DNA, 312 bp, Homo sapiens
  source 1..312: mol_type = other DNA
gccgggcgcggtggctcacgcctgtaatcccagcactttgggaggccaaggcgggcagaccatgaggtcaggagattgagaccatcctggccaacatggtgaaaccctgtctctactaaaaatacaaaaatgagctgggtgtggtggcacgtgcctgtagtcccagctactcgagaggctaaggcaggaaaatcgcttgaacccaggaggcagagactgcagtgagccaagattgcgccagtgcactccagctgggcgacagagcgagactccatctcaaaaaacaaacaaacaaacaaacaaacaaacaaa

SEQ ID NO: 3566 - DNA, 300 bp, Homo sapiens
  source 1..300: mol_type = other DNA
ggccgggcgtggtagctcacgcctgtaatcccagcactttgggaggccgaggcgggcggatcacaagggcaggagatcgagaccatcctggttaacacggtgaaaccccgactctactaaaactacaaaaaaaattagctgggcgtggtggcgggcgcctgtagtcccagctactcaggaggctgaggcaggagaagtgtgaacccaggaggcggagcttgcagtgagccgagatcacaccactgcactccatccagcctgggtgacagggtgagactctgtctcaaaaaaaaaaaaaaa

SEQ ID NO: 3567 - DNA, 36 bp, Homo sapiens
  source 1..36: mol_type = other DNA
cagtggttctcaaagtgtggtccctgggtcgccagc

SEQ ID NO: 3568 - DNA, 138 bp, Homo sapiens
  source 1..138: mol_type = other DNA
ttattttctttgtccctctgtcttcctttcctattagaggataagctacatcagggcagggagggcatccagctgggccattcctggagccctcacgcctgttgctgagtgctcagtacctccttggtgagtggagga

SEQ ID NO: 3569 - DNA, 1553 bp, Homo sapiens
  source 1..1553: mol_type = other DNA
caaattggtaccaggagtggggtgttgctgaagagataccccaaaatgtggaagcaactttggaactgggtaacaggcagagattggaaaagtttgaagggctcagaagaagaaaggaaaatgtgggaaagtttggaacttcctagagacttgttgaatggctgtgtccaaaatgctgatagcgatatggacaataaaatccaagttgaggtggtctcagatggaaatgaggaacttgttgggaactggagcaaaggtgactcttgttatgttttagcaaagagactggtggcattttgcccctgccctagagatttgtgaaactttgaacttgagagagatgatttagggtatctggcagaagaaatttctaagcagcaaagcattcaagaggtgatgtcagtactgttaaaggcatttagttttaaaagggaaacagagcataaaagttcagaaaatttgcagcctgaatatgcaaaaacccattttctggggagaaattcaagctggctgcagtaatttgcataagtagcaggagcctaatgttaatccccaagaccatggggaaaatgtctccaggccatgtgagagaccttcatgacagcccctcccatcacaggcccagaggcccagggggaaaaagtggtttccaggactgggcccaggtcctcatgctatgtgcagtttagggacttggtgccctgtatcccagctgctccagctgtggctgaaaagggccaacatacagcttgggcctgcggtttcagaaggtggaagcctcaagccttggcagcttccatgtggtattgagcctgtgggtgcacagaagtgaagaactgaggtttgggaacctccacctagatttcagaagatgtatggaaacacctggatgcccaggcaaaagtttgctgcaggggcagggccctcatggagaacctctgctagggcagtgtggaagggaaatgtggggttggagcccccacacagagtccctactggggtactgcctagtgaagctgtgaaaagagggccaccatcctctagaccccataatggtagatccactgacagtttgcactatgtgcctggaaaagctgcagacactcaatgccaacccatgaaagcagccaggagggaggctataccctgcaaagccacaggggcagagctgcctaagactcttacatcagtgtgacctggatatgagacctggagtcaaaggagatcattttggagctttaaaatttgactgcctctctggatttcagacacttgcataggctcagtaacccctttgttttggccagtatctcacattttgaatagctggatttatccaatacctgtacccccattgtatctaggaagtaactagcttgcttttgattttaaaggctcataggtagaagggacttaccttgtctcagatgagactttggactgtggacttttgggttaatgctgaaatgagttaagactttgggggactactggggaggcatgattagttttgaaatgtggagacgtgaaatttggaggggccaagggcagaa

SEQ ID NO: 3570 - DNA, 318 bp, Homo sapiens
  source 1..318: mol_type = other DNA
accattctccctgcttggaatacttttcattcttcttccctcctcctcatccttcaggtctcagtttagccatctgcttcctcatgagccctgctctgagccctcttatgtcatttcacattctcttgtacttcctccatcagagaacctctcattctgcattataattgcctgttgtcctgtatgtgtcccctactaaaccacaggttccttaacagtagagaccaggtctatatactaaacctttgcatccccagcaccgagtacagcaccagacacatagtaagtgcacaataaatacttaataagtaaaaggat

SEQ ID NO: 3571 - DNA, 1100 bp, Homo sapiens
  source 1..1100: mol_type = other DNA
tgctctggaaaacacgatagataaaccaaaatggaattctaaaaaatgttcaagtaacccattagaaattaagaaaaagaaaatgaaccaaaaaggacaaaaataaaaataaaatgagagatttaaaacctaatatataaaaatgtaattgaatctaaatagtccacatacaccaattaaaggacagaaattagcagagttaattgagaaaacgtaagctaacaatatgctctctataagaaactcacttcaaatataagaatatagacaagttaaagtaaaaggatggaaaaagatatacaaacactgatcagaagaaagcagaagtggctacattaacatcagataaagtagactctaaagcaaataaatttaaagagacagagaaggacattatataatgataaaagaatcaacacaccaaaaggacataacaatcctaagtgcatatgtaccacacaacagagctgcaaaatatgttaggcaaaactcatataattgaaaggagaaatagacaaatctataattatagttggagacttcgacaacccctttttaacaattgataggacaactagacagagaacatcaaggatgtggaagaatgcaataataccatcaaccgacaggatctaattgacatttatagaaccctacactcaacaacagcagaatgcacattcttttcaagtgcctgtgggacctagaccataacctggactataaatcaaacgtcatctaattttaaagaattaaaatcatatggagggtgttctctggccaaaatggagttacattagaaatcaataacagaaaaatctcctaatacttgagaagtaaatcacatacttcatgaatgggtcaaaaaggaagtcttgaggaaaataaatatatgaaatggaatgaaaataaaaacacaacatatcaaaaattgtgggacctggcaacaaatgaaaagcaaatttatagcactaaatgtatagattagaaagaagaaaatatctcaaatcagtaatttaagttcctacctgaagaacccagcaaaagaagagcaaataagctcaaagcaaggaggaagaaaaaaataatgaaagtaagaa

SEQ ID NO: 3572 - DNA, 1059 bp, Homo sapiens
  source 1..1059: mol_type = other DNA
aatatttgcaaactatacatctgataaagggttaatatcccaaatatataagaaattgaaacaactcaatagaaagaaaacaaagaacagaattttacaaggagcaagggacctgaatagacatttttcaaaagaaggcatgtaatacaaatagtcagcagatatatgaaaaatgctcaacatttgtaatcactgggaaaatgcaaattaaagccacaagaaatatcctctcacacctgtcagaattacttttattaaaaaaaaaagccaaagataagtgttggtgagaatgtggagaaacaggaacccttgtacactgctggtggaaacgtaaatttatggaaaacagtatgaagcttcctctaaaagttaaaaacagaactaccatatgattcagcaatcccacttctggatattcacaaagacattaaaatcagtttgtcaaagagatgtctgcagtcccatgtttattaccacactattcacaatagccaagttatggaatcagtctaagtgtccatcaacagatgaatggataaagaaaatatggcatatatacatcatggaatactatttagtctataaaaagaagaaaagtatcatttgtgacaacatagatggaactggagaacattatgctaagtcaaataaggcaggcacagaaaaatacatgttctcacttacatgtggaatctaagatgatcaaacccatagaagcagagagtagaatgatggttaccagaccgtgggaggttggaggaatgagaagatgatagtcagagcatacaaagtctcagtaaacaagagaaataagttgggtggtggtctttttctgagatctattgcactgcatgtttaatatagttaataatgtattgtaaatttcaaaattgccaagagagtaaatttcaaatgtcctcattatgaaaatgacaagtatttgaggggatggatatgttaactaatttgatttaattgttctatattgtgttcataaatcataatattactttgtaccacataaatacatttagttataaattattaatttataataaa

SEQ ID NO: 3573 - DNA, 2186 bp, Homo sapiens
  source 1..2186: mol_type = other DNA
ggggaggggccaagatggccgaatggaaacagctcaggtctgcagctcccagcgagaccaacgcagaaggcaggtgatttctgcttttccaatcgaggtatccagttcatctcactgggactggtttggcagtgggtgtgacccacagagaaccagcagaagcagggtggggcgtcgcttcatgtgggaagtgcacgcagccaggtgacctccttcctccagcaaagggaagcagtgacagactgtgctacctgcccaaggtactacgcttttcccatggacacttgcaatccacggatcagcacattccctcatgagcctacaccaccagggccctgggtttcaagcacaaatctgggcagctgtttgagcaggcactgagctgcaggattttttttttttttcatactccagcgatgcctggaactccaatgagtcaggaccaccgtccaatctcctggaaagggggctgaagccagggatccaagcagtctcacaagcgggtcccagtcccactcccatgctcccatggaacccagcaagataagaaacacttgcttgaaattctcactgccagcacagcagtctagagtcagcctgagatgattgagtttggtggggggaggagtgaccgtcattactgtggctttagttggtggttttcccctgactgtgctaaggcgactgggagatttttggactgggccgaattcaccacagcacagcaaagcggctgtggtcagactgcttctctagagtcctcctcactaggcaaggtctctctgcaggaaatccagcagctccattcaggggcttacagacagaactctcatctccctgggacacagcacttgaggggaggggcggctgtggtagcagcttcagcggatttaatctttcctgcctgctggctctgaagatactggctgatcctgacaagggagattctcccagcacagcgcaccagctctgctaagggacagactgcctcctcaagtgggttcctgaccgctgtgcctcctgactgggagagacctcccagcaggggccaacagacacctcatacaggagagctctggctggcatcaggccagtgcccctctaagatgaagcttccagaggaaagagcaggcagcaatctttgctgttctgcagtctccactggtgatatctaggcaataagggtctggaatagacctccagcaaactccagcagacctgcagaagaaaggcctgactgtttgaagaaaaactagcaaacaacaacaaacaaaactaaaaaagcagcaacaacaacatcaacaaaagaccctcccacaaaaaccccatccaaaggtcatcagcctcaaagatcaaaggtagagaaatccacaaagatgaggaaaaaacaccgaaaatcgcaaaagccagaatgcctcttctcctccaaacgttcacaacaactgtccagcaagggcacagaactggatggaggatgagatggacaagttgacagaagtaggcttcagaaggtcagtaaataacaaacacctgtgagctaaaggagcatgttctaacccaatgcaaggaagctaagaaccttgataaaaggttacaggaaccgctaactagaataaccagtttagagaggaacataaatgacctgatagaggtgaagaacactgcacgagaacttcgtgaagcatacacaagtatcgatagccaaatcgaccaagcagaagaaaggagatcagaatttgaaaaccatcttgctgaaataaggcatgcagacaagattagagaaaaaagaatgaaaaggaatgaacagagcctccaagaaatatgggactatgttaaaacaccgaacctacaattgactggaatacctgaaagagatggggagaatggaatcaagttggaaaatacacttgaggatattatgcaggagaacttctccaacctagcaagacaggccaacgttcaaatccaggaaatacagagaacaccactaagatactccattagaagatcaaccccaagacacataatcattagattttccaaggtcaaaatgaaagaaaaaatgttaagggtaaccagagagaaaggccaggtcacctaaaaagggaagcccatcagactaccagcggatctctcaacagaaaccctacaagccagaagagagtaggggccaatagtcaacattc

SEQ ID NO: 3574 - DNA, 298 bp, Homo sapiens
  source 1..298: mol_type = other DNA
ggccgggcgcggtggctcacgcctgtaatcccagcactttgggaggccgaggcgtgcggatcacgaggtcaggagatcgagaccacggtgaaaccccgtctctactaaaaatacaaaaaattagctgggcgtagtggcgggcgcctgtagtcccagctactcgggaggctgaggcaggagaatggcgtgaacccgggaggcggagcttgcagtgagccgagattgtgccactgcactccagcctgggcgacagagtgagactccgtctcaaaaaaaaaaaaaaaaaaaaaaaaaaaaa

SEQ ID NO: 3575 - DNA, 223 bp, Homo sapiens
  source 1..223: mol_type = other DNA
gactttggggcatggacctgagttctggttttgattctgccacgagccagctgtgtgaatttggtcaagggacctaactctctgagttccaggttccttatctttcaaatggggatggtgatccctgccctttctacctcatagggatgtgagaaccacctgacttagtggatgtgaaagctgtttgtgatcagtaaagctaccacagatataagggtgttat

SEQ ID NO: 3576 - DNA, 204 bp, Homo sapiens
  source 1..204: mol_type = other DNA
gcactgtccaatagaactttctgtgatgatgaaaagattctacttctgacctattcaatagggtaaccactaatcatgcatggctctcaagcacttgaaatgttgctagtgtgattggggagctgcgttttgaatgttaactaatttaaatttaaatcttaaaaagttacatgtgggtagtggctgccgtacggaacagtacag

SEQ ID NO: 3577 - DNA, 168 bp, Homo sapiens
  source 1..168: mol_type = other DNA
catcacacctgtgacatcttgcaatttatatttgattgtgtcattatctaatgtattcctcctggactctaagctccaaatgaacaaatgctttgtctactttgccataactgtgtccccagtgcttggcatgggacctggtgcagagtaaatacatcataaatattt

SEQ ID NO: 3578 - DNA, 56 bp, Homo sapiens
  source 1..56: mol_type = other DNA
ttcatgagaactccagaatgagtgttgaccactgaagcatcttttaagtctgtgtt

SEQ ID NO: 3579 - DNA, 149 bp, Homo sapiens
  source 1..149: mol_type = other DNA
gtttatacatctcattacaacagtcatccaccatttttctgctactctgattatctgtttatctgtctgtctttcccattattttgtagctgctctaagagaggaggcattttctgatcatctttgtatcctgggcattccctaacaca

SEQ ID NO: 3580 - DNA, 969 bp, Homo sapiens
  source 1..969: mol_type = other DNA
tgtggggaaaagcaagagagatcaaattgttactgtgtctgtgtagaaagaagtagacataggagactccattttgttatgtgctaagaaaaattcttctgccttgagattctgttaatctatgaccttacccccaaccccgtgctctctgaaacgtgtgctgtgtcaactcagggttgaatggattaagggcggtgcaggatgtgctttgttaaacagatgcttgaaggcagcatgctccttaagagtcatcaccactccctaatctcaagtacccagggacacaaaaactgcggaaggccgcagggacctctgcctaggaaagccaggtattgtccaaggtttctccccatgtgatagtctgaaatatggcctcgtgggaagggaaagacctgaccgtcccccagcccgacacctgtaaagggtctgtgctgaggaggattagtaaaagaggaaggaatgcctcttgcagttgagacaagaggaaggcatctgtctcctgcctgtccctgggcaatggaatgtctcggtataaaacccgattgtatgctccatctactgagatagggaaaaaccgccttagggctggaggtgggacctgcgggcagcaatactgctttgtaaagcattgagatgtttatgtgtatgcatatccaaaagcacagcacttaatcctttacattgtctatgatgccaagacctttgttcacgtgtttgtctgctgaccctctccctacaattgtcttgtgaccctgacacatccccctctttgagaaacacccacagatgatcaataaatactaagggaactcagaggctggcgggatcctccatatgctgaacgctggttccccgggtccccttatttctttctctatactttgtctctgtgtctttttcttttccaaatctctcgtcccaccttacgagaaacacccacaggtgtgtaggggcaacccacaaccctac

SEQ ID NO: 3581 - DNA, 324 bp, Homo sapiens
  source 1..324: mol_type = other DNA
gccaagcgtggtggctcattcttgtaatcccagcactttgggaggccaagacaggcggatcacttgaggtcaggagttcaaatccagcctggccaacatggtaaaaccccgtctccactaaaaatacaaaaattagccaggcttggtggtgcatgcctgtcatcccagctactctggaggttgaggcaggagaattacttgaacccaggagatggaggttacagtgagccgagctcacaccactgcattccagcctggatgacaggcactccagcctgggtgacagagccagactctgtctcaaaaaaaaaaaaaaaaaaaaaa

SEQ ID NO: 3582 - DNA, 291 bp, Homo sapiens
  source 1..291: mol_type = other DNA
ggccgggcgtggtggctcacacctgtaatcccagcactttgggaggccgaggtggcagatcacgaggtcaagagatccagaccatcctggccaacatgatgaaaccccatctctactaaaaatacaaaaattagctgggcgtggtggggtgtgcctgtagtcccagctgcaggctgaggcaagagaatcacttgaacccgggaggcagaggttgcaatgagctgaaattgtgccactgcacttcagcctggcaacagagtgagactccatctcagggaaaaaaaaaaaaaa

SEQ ID NO: 3583 - DNA, 298 bp, Homo sapiens
  source 1..298: mol_type = other DNA
tgtggtagctcatgcctgtaatcccagcactttgggaggcagaggcagttgggtcacctgaggtcaggagtttgagaccagcctggccaacatggtacaaccctgtctctactaaaaatacaaaaattagccgggtgtggttgtgcacacctgtaatcccagctactagggaggctgaggcaggagaattgctcaaacccgggaggtagaggttgcagtgagctgagattgtgccactacactccaccctgggtgacagagcaagactctgtctcaaaaaaagaaaaaaaaaaaaaaa

SEQ ID NO: 3584 - DNA, 135 bp, Homo sapiens
  source 1..135: mol_type = other DNA
tactccagaggccaaggaagagagaatcgcttgagcccaagactgcagggcattatgactttgtctgtgaaaagccactgctctctagcctgggcaacatagcaagatcctgtctctaaaaaaaataaaaataaa

SEQ ID NO: 3585 - DNA, 70 bp, Homo sapiens
  source 1..70: mol_type = other DNA
aggtgggaggatcacttgagcctaggagtttgacaccagcctgggcaagacagtgagactccatctctac

SEQ ID NO: 3586 - DNA, 203 bp, Homo sapiens
  source 1..203: mol_type = other DNA
ccagccttggcaacatcgtgagaccctgtttctacaaaaactaaacaagtgtagtggtgcacgcctgtattcccagctacttgggaggctgagatgggaagatcacttgagcctgggaggttgaggctgcattgagctgagatcaagccacggcactccagcctgggagacagagcgaaaccccatctcaaaaaaacaaagaa

SEQ ID NO: 3587 - DNA, 966 bp, Homo sapiens
  source 1..966: mol_type = other DNA
tacagaggtcaaataagcacataaaaaggtgctgtatatcatatgttctcagggaaatacaaattaaaacaaggagataccactacacatctatcaaactagccaaaatccagaaaatggcaaatgctggcaaggatgtggtgcaacaggaactctcactcatggctggtgggaatgcaaagtggtgcagccaccttgaaagacagtgtggtggtttcttacaaaactgaacacactcttaacatataatccagcaattgtgctccaaggtatttatccaagggagctgaaaatgtttgggcacacaaaaacccacatatgtatgttgatagcagctttattcataattgtcaaaacttggaagcaaccaagatgcccttcagtaagtgaatggataaactgcggtatacccagacaacaaagaattattcagcgctaaaaagaaatgaggtatcaagccatgaaaaaaacatggaggaaccttaaatgcatattactaagtgaaagaagccaatgtgaaaagcctacatgtatgattgatacctcaggctgtatgattccaactatatcatattctggaaaaggcaaagctatggagacagtaaaaagatcagggttgggggagggtgggatgaataggcagagaagagcgaatttttagtgcagtaaaactattctgtataatactatattggtggatacatgtcattgtattaacacatttgtcaaaatccatagaaatacaacaccaagagtgaaccctaatgtaaattacagactttggttaatgatgatgtatcaatgtaggttcatcaattgtaacaaatgtacgactttggtgcaggatgttgatagatgggaagctgtgcgtgtgtggcagaagggactatacggaagtcctctgtactttgtgctcaattttgctgtgaacccaaaactgctctaaaaaaattaagtctatttaaa

SEQ ID NO: 3588 - DNA, 200 bp, Homo sapiens
  source 1..200: mol_type = other DNA
gaaagaacaacaacaacaaaaccaaacaaacccaaactcgagatctcagtcccagcttggccactatttggaccttctccctctgaaccttaattttctcactatagatcagggctggtcctatccgcctcacaggcttgccgtaaggattaaaggagcgtgtgtgtttaggcactggtcaccagcccggtgcttggcac

SEQ ID NO: 3589 - DNA, 305 bp, Homo sapiens
  source 1..305: mol_type = other DNA
cgggtgtggtggctcacacctgtaatcccagcacttcaggaggccaaggcgggtagatcacaaggtcaggagttcgagaacagtctggccaacataatgaaaccccgtctctactaaaaatacaaaaaattagctgggcgcgatggtgggcacctgtaatcccagctactcaggaggctgagacaggagaatcacttcaacccggcaggcggaggttgcagtgagccgagatagtgccattgcactccagcccaggtgacagtgtgagactcagtctcaaaaaaaaaaaaaaaaaaaaaaaaaaa

SEQ ID NO: 3590 - DNA, 1154 bp, Homo sapiens
  source 1..1154: mol_type = other DNA
atttgggggctcgtctgggattgcccttgtggctacctgccccatggttcagtagccccctcccacaacagatccaaagaccagcccaagtggctgcttagttctgttggatgaggggctaactctggtactctctctactggtggggcactgctgagccaatgtgcatggatttaattgcaataaggaaatagtcctggggagatataactataggcatatcacagggtctctgtgtgtagcccagtcatggagtgtccatagctttagctccattatatagtgtttggtttggtgagtattgtaggtgctgccaatgcctccttccttctcctgattggtttgtcttattctggggcctgagttcttccgtagccccactgtgggatgtctgtctcagtttggctccttctgggttcttggtcagctctccctaattattaggaagagttttgttttgggagatgtctcctcagtcaggaagatttgaaggagatttctctcattcagagaataggtgggtagcttggaagggatactcttggagttcttggttagggatcttgacttggaagaccttctgtctgtcttgtttttatgtgtgtttgtatatgtggaggcaatttctgaaagaattgctgatggaagtccagcaggcctaactcagagaaccctccttatttatctggtcacatttggtgagtcctggagaagctcaacaggcctgactcggggtaactcgctcttcgtcttgcccagagaccacccactgaattaccattcagaggtcatccctccccaccaggagtggatcaaagacaacagggaccaataggagaaagtctgagccttgccaggtcaatattcggtgctgaacgaggtgactagtgtctgttttgttatgtgtattttgcttcagctgggatggaaaacgttaatttggttccacacgcaacctgttgagcagcatcttgcaaaattgagaatcttttgcctatggttccataaaacataacagagtgactttcttttgtaaagtggcttgacccccacagttatggaacagtgagcagggtcatcaaaagctgctccattcttctggaaactgtaaaggggacccggaaacctggtatgccagcataaagggtaagaaa

SEQ ID NO: 3591 - DNA, 292 bp, Homo sapiens
  source 1..292: mol_type = other DNA
ggccgggtgcggtggctcacgcttgtaatcccagcaccttgggaggccaaggcgggcggatcacgaggtcaggagatcgagaccacagtgaaaccccgtctctactaaaaatacaaaaaaattagccgggcgtggtggcgggcgcctgtagtcccagcttctcagagaggctgaggcaggagaacggcgtgaacccgggaggcggagcttgcagtgagccgagactacgccactgcactccagcctgggtgacagagcgagactccgtctcaaaaaaaaaaaaaaaaaaaaa

SEQ ID NO: 3592 - DNA, 271 bp, Homo sapiens
  source 1..271: mol_type = other DNA
gaaaatattttctaaaaagataaaaaatatacataacgatgaaaaataatacaaatttaaaaaccaatacagtataacaactatttacatagtgcttacattgtattaggtgttataagcaatctagagatgatttagcaagtatacaggaggatgtgcctaggttatatgcaaatactgtgccattttatatcaggaacttgagcatctgcagatattggtatcggagggcggtcctggaaccaagcatccacggatactgaggggtgac

SEQ ID NO: 3593 - DNA, 307 bp, Homo sapiens
  source 1..307: mol_type = other DNA
gctgggcgtggtggctcacgcctgtaatcccagcactttgggaggccaaggtaggtggatacctgaggtcaggagttcaagaccagcctggccaacatggtgaaaccccgtctctactaaaaatacaaaaattagctgggcgtggtggtgggcgcctgtagtcccagctacttgggaggctgaggcaggagaatcgcctgaacccaggaagcagatgttgtaccgagctgagatcatgccattacactccagcctgggcgacagaacgagacgccatcaataaataaataaataaagtaaagtaaaa

SEQ ID NO: 3594 - DNA, 72 bp, Homo sapiens
  source 1..72: mol_type = other DNA
ccccgggcaagtcaccgcacctctgtgcctcggtcctcagctgcccaatgggagaataagcagacctggctc

SEQ ID NO: 3595 - DNA, 98 bp, Homo sapiens
  source 1..98: mol_type = other DNA
tagactgtaagcccgacaagggcagggcttttggttttgttctctgatgtgtctcagtatctagcacataatagacactcaataaatacttgttgaat

SEQ ID NO: 3596 - DNA, 200 bp, Homo sapiens
  source 1..200: mol_type = other DNA
ccacagctggactccaccccgttatgttctgagcatgtctgaagagcgacatgagcgcgtgcggaagaaataccacatcctggtggagggagacggtatcccaccacccatcaagagcttcaaggaaatgaagtttcctgcaggtagtcaggggctggagagagataccacacttttataatcaaatgcctgtgaggtta

SEQ ID NO: 3597 - DNA, 154 bp, Homo sapiens
  source 1..154: mol_type = other DNA
cttctacctcttcaatgacatcgtcaaggtcatcctcaatatcaatcacatcatcatcatgtccatcatgagcctcaacaatagcagttccaagcaccagtaacatacacagcaaccacttcccttccatgatctacacataaagagcaaaatc

SEQ ID NO: 3598 - DNA, 77 bp, Homo sapiens
  source 1..77: mol_type = other DNA
gaatagatgtcttcatcacttcttccactgtgtgttgacactgttttccttacctatttcctcagatccccagcttt

SEQ ID NO: 3599 - DNA, 292 bp, Homo sapiens
  source 1..292: mol_type = other DNA
tatgcagggggaggagcatgcagggggaggagctatgcagggggaggagctatgcaggggggaggagcttggtctcatgttcggggtggaacttgggattctatctgggaggcgagaaaccagctagcgggactctctctcgctttgctgagagtccctgtttccctttttttccttcttgcccaataaattccatttttctcactcttcaaagtgtctgcgagattaatctctcatggccgctgcacaagaacctggcttttagctgaactaaggagaaagtcctacaaca

SEQ ID NO: 3600 - DNA, 183 bp, Homo sapiens
  source 1..183: mol_type = other DNA
ttggcgtgcaacatggggcttgagaaagggtgagtgagatgcaaaccaagaaatttttttcctctctttctaagcctatttatcttcggacttctgagggggaggggaggggaaaccgtgaccccacccccttggtctccgtggccttttccttacttctggacggatgggcgaacggcggtt

SEQ ID NO: 3601 - DNA, 171 bp, Homo sapiens
  source 1..171: mol_type = other DNA
tgagaaccgcagaagaacgctgggcgcgcagcgacccgtccacccccgcgaggagagacttccacagaggcagcgtttccacagcccaaagccacgtttctagggtgatgcagccccagtaagttcctggcggggaagctcacggctgtcaaaagaactcttcgctccagc

SEQ ID NO: 3602 - DNA, 114 bp, Homo sapiens
  source 1..114: mol_type = other DNA
ctgaggccggagagtcccttcaacccgggaggcggcggctgcagggagccgagacggcgccattgccctccagcctgggcaaaaagagcgaaactccgtctcaaaaaaaaaaaa

SEQ ID NO: 3603 - DNA, 130 bp, Homo sapiens
  source 1..130: mol_type = other DNA
gggtacagcggctcacacctgtaatcccagctcttagggagatggaaactggaggatcacttgaggccaggagttcaagaccagcctgggcaacatagcaagacccagtctcttaaaagaaaattaaaaa

SEQ ID NO: 3604 - DNA, 141 bp, Homo sapiens
  source 1..141: mol_type = other DNA
cccggcgttgtggcacatgcctactggaggctgaggtgggaggatctcttgaactgcaggggcttaaggctgtagtgagccaggatcgcacccctgcactccagcctagacaatggagcaaggtggacggatctcaaaaaa

SEQ ID NO: 3605 - DNA, 196 bp, Homo sapiens
  source 1..196: mol_type = other DNA
gaccaattagtgaggggtgcagtcatgcccgtgggccttcaacagcattttactgaaataaaacagaaaatatcagagtgctttggatgtcataagggaaagaacactgcagaaattttctttctgttatatatgtgcaggtctatattggatcagtatgtgcaatgtacttcttattgaagggcaggtaaagaaa

SEQ ID NO: 3606 - DNA, 962 bp, Homo sapiens
  source 1..962: mol_type = other DNA
atttatgcagccaaaaaacacatgaagaaatgctcatcatcactggccatcagagaaatgcaaatcaaaaccactatgagatatcatctcacaccggttagaatggcaatcattaaaaagtcaggaaacaacaggtgctggagaggatgcggagaaataggaacacttttacactgttggtgggactgtaaactagttcaaccattgtggaagtcagtgtggcgattcctcagggatctagaactagaaataccatttgacccagccatcccattactgggtatatacccaaatgagtataaatcatgctgctataaagacacatgcacacgtatgtttattgcggcactattcacaatagcaaagacttggaaccaacccaaatgtccaacaatgatagactggattaagaaaatgtggcacatatacaccatggaatactatgcagccataaaaaatgatgagttcatatcctttgtagggacatggatgaaattggaaaccatcattctcagtaaactatcgcaagaacaaaaaaccaaacaccgcatattctcactcataggtgggaattgaacaatgagatcacatggacacaggaaggggaatatcacactctggggactgtggtggggtcgggggaggggggagggatagcattgggagatatacctaatgctagatgacacattagtgggtgcagcgcacaagcatggcacatgtatacatatgtaactaacctgcacaatgtgcacatgtaccctaaaacttagagtataataaaaaaaaaaacacatgaaaaaaaaaaaaaaacaaaacaaaacaaagcaaacatggaaatgtttgttattttaattgttatgatggtttcatggctgtttgcatgtgtcaaaactcatcaaatttgtgtacgttaaatatgtgaaacttattgtatgctggttacacctcaataaagctgt

SEQ ID NO: 3607 - DNA, 196 bp, Homo sapiens
  source 1..196: mol_type = other DNA
gtggtgtgctggagctggctcatgcttacttgcaagagcctattgttaattttttaggatttttacatgcccagctgaggtcatgggggtagttttaaatcgggtatggtgcagtatttataccacagaaattggcaaacactacgagtcaggactcctgctcccagagagctaattgttaaagatttgccagctc

SEQ ID NO: 3608 - DNA, 203 bp, Homo sapiens
  source 1..203: mol_type = other DNA
cagccttggcaacattgtgagaccctgtttctacaaaaagtaaatgagtgtagtggtgcacgcctgtattcccagctacttgggaggctgagatgggaagatcacttgagcctgggaggttgaggctgcattgagctgagatcaagccacggcactccagcctgggagacagagcgaaaccccatctcaaaaaaacaaagaaa

SEQ ID NO: 3609 - DNA, 7534 bp, Homo sapiens
  source 1..7534: mol_type = other DNA
tctggtgcccaacgtggaggcttttctctagggtgaaggtacgctcgagcatggtcattgaggacaagtcgacgagagatcccgagtacgtctacagtcagcctttcggtaagcttgtgcgcttggaagaagctagggtgataatggggcaaactaaaagtaaaattaagagtaaatatgcctcttatctcagctttattaaaattcttttaaaaagagggggagttaaagtatctacaaaaaatctaatcaagctatttcaaataatagaacaattttgcccatggtttccagaacaaggaactttagatctaaaagattggaaaagaattggtaaggaactaaaacaagcaggtaggaagggtaatatcattccacttacagtatggaatgattgggccattattaaagcagctttagaaccatttcaaacagaagaagatagtgtttcagtttctgatgcccctggaagctgtttaatagattgtaatgaaaagacaaggaaaaaatcccagaaagaaatggaaggtttacattgcgaatatgtagcagagccggtgatggctcagtcaacacaaaatgttgactataatcaattacaggaggtgatatatcctgaaacgttaaaattagaaggaaaaggtcccgaattagtggggccattagagtctaaaccatgaggcacaagtcctcttccagcaggtcaggtgcctgtaacattacaacctcaaacgcaggttaaagaaaataagacccaaccgccagtagcctatcaatactggctgccggctgaacttcagtatcggccacccccagaaagtcagtatggatatccaggaatacccccagcaccacagggcagggtgccataccctcagccacccactaggagacttaatcctatggcaccacctagtagacagggtagtgaattacatgaaattattgataaatcaagaaaggaaggagatactgaggcatggcaattcccagtaacgttagaaccgatgccacctggagaaggagcccaagagggagagcctctcacagttgaggccagatacaagtctttttcgataaaaatgctaaaagatatgaaagagggagtaaaacagtatggacccaactccccttatatgaggacattattagattccattgctcatggacatagactcattccttatgattgggagattctggcaaaatcgtctctctcaccctctctatttttacaatttaagacttggtggattgatggggtacaagaacaggtccgaagaaatagggctgccaatcctccagttaacatagatgcagatcaactattaggaacaggtcaaaattggagtactattagtcaacaagcgttaatgcaaaatgaggccattgagcaagttagagctatctgccttagagcctgggaaaaaatccaagacccaggaagcgcctgcccctcatttaatacagtaagacaaggttcgaaagagccctaccttgattttgtggcaaggctccaagatgttgctcaaaagtcaattgccaatgaaaaagcccataaggtcatagtggagttgatggcatatgaaaacgccaatcttgagtgtcaatcagccattaagccattaaaagcaaaggttcctgcaggatcagatgtaatctcagaatatgtaaaagcctgtgatggaatcggaggagctatgcataaagctatgcttatggctcaagcaataacaggagttgttttaggaggacaagttagaacatttggaggaaaatgatataattgtggtcaaattggtcacttaaaaaagaactgcccagtcttaaataaacagaatataactattcaagctactaccacaacaggtagagagccagctgacttatgtccaagatgtaaaaaaggaaaacattgggctagtcaatgttgttctaaatttgataaaaatgggcaaccattgtcgggaaatgagcaaaggggccagcctcaggccccacaacaaactggggcattcccaattcagccatttgttcctcagggttttcagggacaacaacccccactgtcccaagtgtttcagggaataagccagttaccacaatacaacaattgtcccccgccacaagcggcagtgcagcagtagatttatgtactatacaagcagtctctctgcttccaggggagcccccacaaaaaatccccacaggggtatatggcccactgcctgaggggactgtaggactaatcttgggaagatcaagtctaaatctaaaaggagttcaaattcatactagtgtggtagatacagactataaaggtgaaattcaattggttattagctcttcagttccttggagtgccagtccaggagacaggattgctcaattattactcctgccatacattaagggtggaaatagtgaaataaaaagaataggagagtttggaagcactgatccgacaggaaaggctgcatattgggcaagtcaggtctcagagaacagacctgtgtgtaaggccattattcaaggaaaacagtttgaagggttggtagacactgaagcagatgtctctatcattgctttaaatcagtggccaaaaaattggcctaaacaaaaggctgttacaggacttgtcggcataggcacagcctcagaagtgtatcaaagtactgagattttacattgcttagggccagataatcaagaaagtactgttcagccaatgattacttcaattcctcttaatctgtggggtcaagatttattacaacaatggggtgtggaaatcaccatgcccgctccattatatagccccacgagtcaaaaaatcatgaccaagatgggatatataccaggaaagggactagggaaaaatgaagatggcattaaagttccagttgaggctaaaataaatcaaaaaagagaaggaatagggtatcctttttaggggcggccactgtagagcctcctaaacccataccattaacttggaaaacagaaaaaccggtgtgggtaaatcagtggccgctaccaaaacaaaaactggaggctttacatttattagcaaatgaacagttagaaaagggtcatattgagccttcattctcgccttggaattctcctgtgtttgtgattcagaagaaatcaggcaaatggcgtatgttaactgacttaagggccgtaaacgccataattcaacccatggggcctctccaatctgggttgccctctccggccatgatcccaaaagattggcctttaattataattgatctaaaggattgcttttttaccatccctctggcggagcaggattgcgaaaaatttgcctttactatactagccataaataataaagaaccagccaccaggtttcagtggaaagtgttacctcagggaatgcttaatagtccaactatttgtcagacttttgtaggtcgagctcttcaaccagttagagacaagttttcagactgttatattattcattatattgatgatattttatgtgctgcagaaacgaaagataaattaattgactgttatacatttctgcaagcagaggttgccaacgcaggactggcaatagcatctgataagatccaaacctctactccttttcattatttagggatgcagatagaaaatagaaaaattaagccacaaaaaatagaaataagaaaatacacattaaaaacactaaatgattttcaaaaattgctgggagatattaattggattcggccaactctaggcattcctacttatgccatgtcaaatttgttctctatcttaagaggagactcagacttaaatagtaaaagaatgttaaccccagaggcaacaaaagaaattaaattagtggaagaaaaaattcagtcagtgcaaataaatagaatagatcccttagccccactccaacttttgatttttgccactgcacattctccaacaggcatcattattcaaaatactgatcttgtggagtggtcattccttcctcacagtacagttaagacttttacattgtacttggatcaaatagctacattaattggtcagacaagattacgaataataaaattatgtggaaatgacccagacaaaatagttgtccctttaaccaaggaacaagttagacaagcctttatcaattctggtgcatggcagattggtcttgctaattttgtgggaattattgataatcattacccaaaaacaaagatcttccagttcttaaaattgactacttggattctacctaaaattaccagacatgaacctttagaaaatgctctaacaatatttactgatggttccagcaatggaaaagcagcttacacagggccgaaagaatgagtaatcaaaactccatatcaatcagctcaaagagcagagttggttgcagtcattaaagtgttacaagattttgaccaacctatcaatattatatcagattctgcatatgtagtacaggctacaagggatgttgagacagctctaattaaatatagcatggatgatcagttaaaccagctattcaatttattacaacaaactgtaagaaaaagaaatttcccattttatattactcatattcgagcacacactaatttaccagggcctttgactaaagcaaatgaacaagctgacttactggtatcatctgcattcataaaagcacaagaacttcatgctttgactcatgtaaatgcagcaggattaaaaaacaaatttgatgtcacatggaaacaggcaaaagatattgtacaacattgcacccagtgtcaagtcttacacctgcccactcaagaggcaggagttaatcccagaggtctgtgtcctaatgcattatggcaagtggatgtcacgcatgtaccttcatttggaagattatcatatgttcatgtaacagttgatacttattcacatttcatatgggcaacttgccaaacaggagaaagtacttcccatgttaaaaaacatttattgtcttgttttgctgtaatgggagttccagaaaaaatcaaaactgacaatggaccaggatattgtagtaaagctttccaaaaattcttaagtcagtggaaaatttcacatacaacaggaattccttataattcccaaggacaggccatagttgaaagaactaatagaacactcaacactcagttaaacaaaaagaagggggagacagtaaggagtgtaccactcctcagatgcaacttaatctagcactctatactttaaattttttaaacatttatagaaatcagactactacttctgcagaacaacatcttactggttaaaagaacagcccacatgaaggaaaactaatttggtggaaagataataaaaataagacatgggaaatagggaaggtgataacgtgggggagaggttttgcttgtgtttcaccaggagaaaatcagcttcctgtttggatacccactagacatttgaagttctacaatgaacccatcggagatgcaaagaaaagcacctccgcggagacggagacactgcaatcgagcaccgttgactcacaagatgaacaaaatggtgacgtcagaagaagagatgaagttgccatccaccaagaaggcagagccgctgacttgggcacaactaaagaagctgacgcagttagctacaaaatgtctagagaacacaaaggtgacacaaaccccagagagtatgctgcttgcagccttgatgattgtatcaatggtggtaagtctccctatgcctgcaggagcagctgcagctaactatacctactgggcctatgtgcctttcccgcccttaatttgggcagtcacatggatggataatcctatagaagtatatgttaatgatagtgtatgggttcctggccccacagatgatcgctgccctgccaaacctgaggaagaagggatgatgataaatatttccactgggtatcgttatcctcctatttgcctagggagagcaccaggatgtttaatgcctgcagtccaaaattggttggtagaagtacctactgtcagtcccatcagtagattcacttatcacatggtaagcgggatgtcactcaggccacgggtaaattatttacaagacttttcttatcaaagatcattaaaatttagacctaaagggaaaccttgccccaaggaaattcccaaagaatcaaaaaatacagaagttttagtttgggaagaatgtgtggccaatagtgcagtgatattacaaaacaatgaatttggaactattatagattgggcacctcgaggtcaattctaccacaattgctcaggatgaactcagtcgtgtccaagtgcacaagtgagtccagctgttgatagcgacttaacagaaagtttagacaaacataagcataaaaaattgcagtctttctacccttgggaatggggagaaaaaggaatctctaccccaagaccaaaaataataagtcctgtttctggtcctgaacatccagaattatggaggcttactgtggcctcacaccacattagaatttggtctggaaatcagactttagaaacaagagatcataagccattttatactatcgacctaaattccagtctaacggttcctttacaaagttgcgtaaagcccccttatatgctagttgtaggaaatatagctattaaaccagactcccagactataacctgtgaaaattgtagattgcttacttgcattgattcaacttttaattggcaacaccgtattctgctggtgagagcaagagagggcgtgtggatccctgtgtccatggaccgaccgtgggaggcctcgccatccatccatattttgactgaagtattaaaaggtgttttaaatagatccaaaagattcatttttactttaattgcagtgattatgggattaattgcagtcacagctatggctgctgtagcaggagttgcattgcactcttctgttcagtcggtaaactttgttaatgattggcaaaaaaattctacaagattgtggaattcacaatctagtattgatcaaaaattggcaaatcaaattaatgatcttagacaaactgtcatttggatgggagacagactcatgagcttagaacatcgtttccagttacagtgtgactggaatatgtcagacttttgtattacaccccaaatttataatgagtctgagcatcactgggacatggttagacggcatctacagggaagagaagataatctcactttagacatttccaagttaaaagaacaaattttcgaagcatcaaaaacccatttaaatttggtgccaggaactgaggcaattgcaggagttgctgatggcctcgcaaatcttaaccctgtcacttgggttaagaccatcggaagtactacaattataaatctcatattaatccttgtgtgcctgttttgtctgttgttagtctgcaggtgtaaccaacagctccaaagagacagcgaccatcgagaacgggccatgattacgatggtggttttgtcgaaaagaaaagggggaa

SEQ ID NO: 3610 - DNA, 286 bp, Homo sapiens
  source 1..286: mol_type = other DNA
ctgcccagtgattttctatccatctatcaatcttaaatgccacctcctctatgaagcccttcctgattcccttaggtaatcccattccctctagacttagtctatacttaatccttttacagcacttaccagagactgcctcatatcatagtgaagtatgcacacgtctaactcttccactagattatcagctccttgatgatatgggttgattcacagtcatttctgtatccttcacatccccgggaaaagcaacctacacacagtaggtggtcaataaatgttt

SEQ ID NO: 3611 - DNA, 144 bp, Homo sapiens
  source 1..144: mol_type = other DNA
ggctggggtagtgacttacatctgtaatcccagcacttcgggaggcgaaggcaggtggattgcttgtgcccaggagtttgagaccagcctgggtaacatggtgagaccccatctctatttttataaaattaaaaaaaaaaaaaa

SEQ ID NO: 3612 - DNA, 36 bp, Homo sapiens
  source 1..36: mol_type = other DNA
ggagtttctctgaacctactctggttcaaggggctg

SEQ ID NO: 3613 - DNA, 301 bp, Homo sapiens
  source 1..301: mol_type = other DNA
gccgggcatggtggctcatgcctgtaatcccaatactgggaggccgaggcaggcagatcacaaggtcaggagttcgagaccagcctgaccaacatggtgaatccccatatctactaaaaatacaaaaaattagccaggcatagtggtgcctgcctgtaatcccagctacttgggaggctgaggcaggagaatcgcttgaacctgggagatggaggttgcagagccgagatcatgccactgcagtccagcctgggtgacaaagcaagactccgttctcaaaaaaaaaaaaaaaaaaaaagaa

SEQ ID NO: 3614 - DNA, 118 bp, Homo sapiens
  source 1..118: mol_type = other DNA
ccacaagactcaaattgtataaggatagagtctgtttcattcatcaacatatccagcacctgacatagttttacatggcacagagtgggtgttcaataaatatttgtcaatgattgaa

SEQ ID NO: 3615 - DNA, 427 bp, Homo sapiens
  source 1..427: mol_type = other DNA
tttttctctcccttcacacttgactccttttagcctaaaaagacttgttcaagactcctgtttttcaagaaaattttaaaaatcctttaccctgtgtcactctcttggttattatctcttttccttccacttatccccaagcttggtatcgccactccttcagttctcagttattttctaaaactttgcagtttttttatggatttgcccccaaccagttcattgacgttgcttttgccttagagatcagtgatatcctacttaccgaatctactggatattttagtccttgtcttacctgatttctgggaagttttggtgctaactgctcccttatttcaactgtactttgttggcatttatgatacctttttcttcctatctctgtgactacttctttgtctgtatttcttttgaaggatcttac

SEQ ID NO: 3616 - DNA, 247 bp, Homo sapiens
  source 1..247: mol_type = other DNA
agtggttaagagaatggcctccggtgctagactgaatttgacttccagctctagagtttactagtgttgtcactttgggcaaattgcttgatctctccacagtcagtttcatctacaaaatgaggaagatcatagtaatcataccttctcactcgcttcataggcttgtttgaggattaagtgagctaatataaacaaaactcctacagagtagctggaatagtactatataaatgtttgcaattat

SEQ ID NO: 3617 - DNA, 370 bp, Homo sapiens
  source 1..370: mol_type = other DNA
gcaaatgactacaaattctatggagtacaaattagcaatacttatcaacattatgaatgagtatacctttagacccagcaatttcacttctaggtatatccagatacatgggtgaaagatcattcattacaacgtttttaaataaaaatgtctaaagactggaaacaaccgaagtgtccatcaattggtaattgcttaaataagttatattatgcccatacaatgtagccctaagaatgaggggcctttctacgtgctaaggaataatatcccaggtatattgtaaagtgaaaaaagcaaggtgaaaagtgggctatgtatactatgctattatttgtatacaaagagtcaaaaaaggaataaatacata

SEQ ID NO: 3618 - DNA, 121 bp, Homo sapiens
  source 1..121: mol_type = other DNA
catgtggccttgagcaagtcccatctcacctctaggcctcagtgtcctcatctataaaatgagggacttccctagaagtcttcatggtctcttccagcccagacatcctgtgatgtcatga

SEQ ID NO: 3619 - DNA, 407 bp, Homo sapiens
  source 1..407: mol_type = other DNA
tctgccctctgccatttcagccttatttcccatgtgattctttcccgccactcaactgggcatacacactatcaccagtgtaatatgcagtttgcctcgctgtaccttcattattggcatctctgcctaaaatgcttttctgcattttttttggctaatttttgtctgattcttcctgcatagctcatcttaagttccatcttcactgtaagacttaccttaccatgcttacatttacatagtggttaatatctgtatcattcatttagaacttggcatttatattcttattaattacctttctttcttttttcttttcttttttttttttggtcattccctaagtaaattagaagttccttaaaggtagatactgtgatcttaactacctttgagtattcctgaca

SEQ ID NO: 3620 - DNA, 326 bp, Homo sapiens
  source 1..326: mol_type = other DNA
atattaatacgattggtaaaaatgcaatcagtaataaaagggacgaactattaatacatacaacaacatggatggctctccaggacatccttaaaaaaaaaaatgccaaactgcatactgtatgattttacttatgtaacaatctcaaactgataaaacagagatgaagaatagattcgttgttgtcaaggcacagggatgtgactgtatgtacaggggatgctggaagggcaacatgagcaagttcctttgtagtgacagggcagttctgtatcttgcatgtggtggtggttacctgaatctatacctataaattgcatagaact

SEQ ID NO: 3621 - DNA, 3588 bp, Homo sapiens
  source 1..3588: mol_type = other DNA
attaagagtggacacagggagaatgcagaagctgggctgaagggtcaggaagctgcataccctgcacagggctatgaagcacccacactcgttcttggcccccagcaactcctggggaaggggttgaacaggcggcctgcccctgccgtggacctttggaatccaggcagcaggaaaccccacaaccctcatggacaattggactggcaggaagagcttcttagagaggtagtaggaatagagctccatcctgggcagggcccagagggtttggtgcagaaacatctgcagtggagcatggccagggacacaaatcccccaagccttgccttgctcctctaggagactttggccaaagggtgaccatgagacctagacagaggagaatggtcttacccatgagatggggccagtccaatctgagtgatcccctgtctgctggccactcctgaggctccagccttgccacactagctggagttgcagcctcagatgcccaactatggtgcttcctaggggaccatatcatagctgctttgctggcagatggcacctgaccattggagatttccagcagaacagtccctactgacatgcatcagcccacctgcagcctcccccaaccacagcctacccaatgccaccttgccagtatgcacttgtccatggtcaccccaccaccactttgccagtgcacacgtgtgggtggaccttgcctcttctcctccaatggcttatgtgtgcacatatcccactgctgctgttggcataagcacaacgtgtggccctgcctcccctggtgcttccatttctggtgtgaaagagtgcatggacaccagcagccccacccccactcctgctgacactgccaccagcgtgaatgtgtgcatggccccacaacccccccaacaccatcactggcacaaatgcatgcacagacaccagcaactctgcccctacccctgtgctgccactgtggctgctgcaaaccagcacacagacaaccacggccctgccttcccagtgccaccacaactgccaatgtgaatgcatgcatggatgctggcaactctacccacccctgcactgccactgctgcctgtgcaaactcatgcacaaagactggtagcctcctgcctccaccactgccagtaccagtgccagcactgtcactggcacttctgcctctgcctgcatccccccaccagggcaactgcatgcaggaaccctgcagccctactctcagaggtaccccaccccagctgatgcacatacaaaccactgcactgccctagctgctggcacatgtgagtgagcatggaccctgctgccactaccctgatgaagtgctttggcctgcaccactcattggagttttgtggccagcagactgagatcagttcggcctctccaacacagcaggttcctagccttgaggggccagagaacaaaggtgggggcctgataccagtcctgcagagttagagcatgcagaccaggagtgctaagctgagctttggccccttaaaatcttccagatgggaacccagtcaactgaacccatcttatatcaaaatcagatgtcccccaaggacatcaaataacataaaacataaaacaaaacaaaaacccatccaaaggacagcaacttcaaagactaaaggaacatcagcccacacagatgagaaggaaagaatgcaagaactcagtggcaactcaaaaagccagagtatcttcttacctccaaagaccacactagcatcctagcaatggttcttaacctgttcaaaatgacagaattagaattcagaatatggatagaaacaaagatcatcaacatccaagagaaagtgaaaacccaatccgaggaatctaaggaatacaacaaaatgacacaggagataaaagacaaaatgtccatttaaagaaaggatcaaactgatctgatagagctgaataattcatttcaagaatttcataatacaaatgcaagctgaggaaagagtctcagctcaaagaccagttcttcaatataactcagtcagacaaaaataaagaaaaaaataaaaattattatgtaaagagaacaactcagccactcattggtgttcttgaaagagaggcagagaaggcaagcaacttggaaaacatatttgaggatattattcacaaaaatttccccagcctcactggagaggacaacattcaaattcaggaaatgcagagaactcctgtgaggtactatacaagatgaccatcccaaagacaccatgtctccaagacatagtcatcagattcttcaaggttgaaatgaaagaaaaaatgttaaaggcagctagggagacagggcgggtcacctacaaagggaaccccatcacgctaacagtggacttttcatcagaaatgctacaagccaaaagagattggggcctgtactgaacattcttaaaagaaattccaaccaagaatttcatatctagccaaactaagcttcataagtgaatgagaaataagatccttttcagacaagcaaatgctaacggaattcactaccattagacctgccttagaggagatccttaaggaagtgccaaatatgaaaaaggaagtccattaccaaccaccacaaaaacagacttaagtaatagaccattgacagtataaagcaaccacgcaatcaaatctgcataataaccagctaacaagacaatgacaggatcaaatccacacataccagtattaaacttgaatgcgcacaggttacatgccccaattaaaaggcacagagtggcaagttggagaaagaagcaagatccaactgtatgctgtctacaggagacctatatcacacgcagtgacacccacaggctcaaagtaaagggatgcagaaaaatctaccaaccaaacaaaacagaaaaaagcagggattggtattccaatttctgtcaaaatttattttaaaccaataatgatcagaaaagacaaagaagggcattacataatggtaaagagttcaattcaacaagaagacttaactatcctaaatatatatgcacctaacacaagagcgcacagattcataaagtaagttcttagagacttacaaagagacttagatagccacataataatagtaggagacttcaacattttgctgacagtattacatgaattatcagggcagaaaactaacaaagatagtaaggacctcaacttgacacttgacaaaatgggcttacagaactctccaccccaaaacaaatatacattattctcatctgcacatggcatatactctaaaactgacttcacaattagacataaaacaatcctcagcaaattaaaagaaaacccgaaataataccaaacacactctcaggcaacagcacaataaaaatagaaatgagtacgaagaaaattactcaaaaccacccgattacatggaaattaacctgctcctgaaagacttttgggtaaacaatgaaattaaggcagaaattaagaaattatttgaaattaatgagaagaaagataacaatataccaggatctctgagacacagcaaagccatgttaagagtaaagtttt

SEQ ID NO: 3622 - DNA, 2271 bp, Homo sapiens
  source 1..2271: mol_type = other DNA
tctcaaattaacaacccaacatcacacctcaaagaagtagagaaacaagaacaaaccaacaccaaagctgtcagaagacaagaaataaccaaaattagaactgaactgaaggaaattgagatgcaaaaaactatacaaaagatcaacgaatccaggagttattaagaagaataagtttcatagatcacgacctagactaataaagaataaaagaagatccaaataaacacaatcagaaatgttagaggacattaccacttgaccccatagaaacacaaaaactctcagagattactgtgagcacctttttggacacaaactagaaaacatacagcctggaaacatacagcctctcaagattgaaccaggaagaaattgaatccctggacagaccaatagtgggatctgaaactgaatcagtaacaaaaagcctaggaaccagagaaagcccaggaccagatgcattcacagccaaattctgtcagagttataaagagctggtaccattcctacggaaactattccaaaaaaactgagttgggggactcctccctaactcattctgtgaggccagcatcattctgacactaaaacctgtcagagacacaacaaaaagagaaaacttcaggtcaatatccttgatgaacatagatgcaaaaatcctcaacaaaatactagcaatccagatccagcagcacattaaaaagctaatccaccacaatcaagtaagctttatccctgggatgcaaggttgtgtcagcctacgcaaatcactaaatgtgattcatcacataaaccgaactaaaaacaaaaaccacacaatcatctcaatatatgcagaaaaagcttttgatgaaattcaatatccattcatgttaaaaactctcaacaaactacatgttgaaggagcatacctcaaaataagagcctagatctatgacaaatccacagccaacatcatactaaatgggcagaagctggaagcattccacttgagaactggaataagacaaggatgtccactctcaccactcctattcaatataatattggaagtcctagccagagcaatcagacaagagaaagaaaaaaaaaagcatccaaatagaaaaagaggaagtcagaagtcaaactatctttgtttgcaggtgatatgattgtatacctagaaaaccccatagtctctgcataaaagctcctagatctgattaaaagaaaaaagtcagcaaagtttcaggatacaagatcgatgtacaaaaatcagtagtatttctatacaccaataagattcaagctgagacccaagtcaagaacgcaatcctactttcgatactcacatacacaaaaatatctagtaatacatttaaccaaggaggtgaaagatctctacaaggagaactagaaaacactgctgaaagaaatcataggtgacacaaagaaatagaaaaatattccgtgctcacagattggaagaatcaatatcattaaaatcactgactccccaaagcaatttacagattcaatgctatttctatcaaactatcaatgttatttttcacagaaatagaaaaaaactattcaaaaaattgatatggaaacaaaaaagagcctatatagacaaagcatttctaagcaaaaaggacaaagcaataggcagcacattaccccagttcaaactatactacaagattacagtaaccaaaacatcatggtaccagtataaaaacagtcacatagaccaatgaagcagaatagagaacccaaaaacaaaactacacacctacagccatctgatcttctacaaagtcaacaaaaataagcaatggggaaaggactcctaatataatagatggtgctgggatagctggctagctatgtgtggaagaatgaagctagacctgtacctttcaccatgtagaaaaaattaactcgagatgaattacagatttaaatgtaagacctcaaactataggaatcctagaagaaaacctaggaaacaccattctggacattggccttgggaaataatttatgactaagtcttcaaaagaaattgcaacaaaaacaaaaattgacaagtcagacctaattaaactaaagagctactgaaccacaaaagatactatcaaaagagtaagcaacaacctacagaatgtgagaaactatttgtaaactatgcacctgacaaacacctaatatccagcatctataaggaacttaaacaattcaacaagcagaaagcaaacaaccccattaaaaagtgggcaaaag

SEQ ID NO: 3623 - DNA, 246 bp, Homo sapiens
  source 1..246: mol_type = other DNA
ggctgggcatggtggctcacacctgtaatcccagcccttggggaagctgaggcaggtggatcacctgcggtcaggagtttgagaccagcctggccaatatggtaaaacccaatctctactaaaaatataaaaactagtcaggtgtggtagcatgcacctggagtcctaggtgctctggaggctggggcaggagaactgtttgtttgaatctaggaggcggaagctgcagtgagctgagattgcacc

SEQ ID NO: 3624 - DNA, 306 bp, Homo sapiens
  source 1..306: mol_type = other DNA
ggctaggcgcagtggctcacgcctgtaatcccagcactttgggaggccaaggcaggcagatcacctgaggtcaggagttcgagaacagcctgaccaacatggtgaaaccccatctctactaaagatacaaaattacctgggtgtggtggtgcatgcctgtaatcccagctactcaggaggctgaggcaggagaattgcttgaccctgggaggcggaggttgcagtgagccaaggctgcaccattgcactccagcctgggcaacaagagcgaaatttcatctcaaaaaataaataaaagtaaaataa

SEQ ID NO: 3625 - DNA, 331 bp, Homo sapiens
  source 1..331: mol_type = other DNA
tccctaaatgcgctttgtgtgttttccacctcagtagccttgcacacatcattacttctgcatccttctttgtgaccaagtgaatacctacctacctcttaggactcagcttcagtgattctgttttcataggctttttaaagcccttttcagtcaaattagatgctcctttgttctggtcctttactcttcccctcccatgttgtcgcactgatcacactgctttgtaattattttctttattgttggtaaactccatattttaaaaatttacctgtatacatagtgcttaatgcatggtaggcccttagtaatgtttttgaattaatga

SEQ ID NO: 3626 - DNA, 309 bp, Homo sapiens
  source 1..309: mol_type = other DNA
gccgggcgcggtggctcacgcctgtaatcccagcactttgggaggccgaggcgggcggatcaggaggtcaggagatcgagaccatcctggctaacacggtgaaaccccgtctctactaaaaatacaaaaaaattagccgggcgtggtggcgggtccctgtagtcccagctcctcgggaggctgaggcaggagaatggcgtgaatccgggaggcggagcttgcagtgagccgagatcgcgccactgcactccagcttgggcgacagagcgagactccaactcaaaaaaaaaaaaaaaaaaaaaaagaaaa

SEQ ID NO: 3627 - DNA, 1458 bp, Homo sapiens
  source 1..1458: mol_type = other DNA
gacatgatacttcttgatatcaaaatattttacagagctacaataaccaaaacagtatgggactagcttaaagagacatacagaccaaaggagcagaatagagagcccacaaataaaaacatgcaaataatatggtcaactgatcttcagggatgccaagaatgcacaataaggaaggaatgttttctgcaacaaatgatgttggaagaactaggtattcacatgaaaaaagatgaaattggacccctatcttctaccataaaaaagaaaaaaactcaaaatgaattggagacttagacataagaccaaaaaatgtaaatctcctggaagaaaacatgaggggaagcttcaccacatcattcttagtaatttcgtggatgtgacgtcaaaagcacagccaacaacagaaaataagacaggtgggactacatcaaactaaaaagcttctgtacagcaaaggaaacaactgagtgaaaaggaaatctaaggaatgggagaaagtatttgcagaaccaaataaatgataaggaatgaatcccaaaaatatatgagaaactcccacaactgatagtaaaaaatatctgcccaattaaaaacagtctaaatgatgcagaaaaaaattaaattaaaaatgtttttttaaatgtgctaagaacttgaatagacatttctccaaacagatggccaacagatacatgaaaaaaaagttcagtgtcactaggcatcaaggaaatgcaaatcaaaaccactatgaggtatcagtcacttcacacctttcaggatggctatcaaaaaaaaaaagacaactagtattggtgaggatataaataaattggaatccttgcacaatgttggcaggaataggtgcagccattatggaaaacagtatgaatgttccttaaaaaattaaaataccatacaattcagcaatcccacttgctgaacatttatccaaaagaactgaaatcaggatcttgaagttttagcactcctatgttcattgcagcactatttacagtagccacgagaggaaataaatattcgtcaacagattaatggataaagaaaatgtagtatatgtatccaatggaatactattcagctcttaagaacaaggatattctgcatatgcaaccacatggatgaaccttgaggacattatgctaagtgaagtaagccagtcacagacataaactgcatatttctatttatatgaggaatctaaaatagtcacttccactcatatgagctatctcaaatagattgaaagagtggaatacgggttgctaggggctgggagggaggaggaaatgggcagttactaatcagtgggcataaagtttcaattgcgcaagatgaataaactggaggtctgtacaacattgtacctagagtcaacaatagtgtacacttaaaaatgtgttaagtgggtagatctcatgttcttattacaataaa

SEQ ID NO: 3628 - DNA, 2509 bp, Homo sapiens
  source 1..2509: mol_type = other DNA
caattgcaattggattgatctgtttataaggctttattaaaattagctttagcatttataatacactggcacaaagttagaatttggatttctcttttgaacaagatttttgtatacattaataagaaatagtaaaagatttttgtttaccttttgagtaaactgcaaaaaatattagtaataagaggagagaatttccctaatgctgtttttattatgtcttttgattgtttggaaaactgaatctcccctctgtcaaagagtaaaatttttgctttttgaaatttttgaattatcagtttggctaaatgaataactattatcttacagtgacctgtaatcttattttgatcaagtgttttaaacctttgatatttgacaaacttcccaaaatcaaatgtaaaattctaacttaaatgttttcgacctcaagctaacttttgggcattaaagcccttggaagtccaaatagggcccctggaagtccaaaagaaacatattaggctaatttggtatattaaaatcatacaggaagctgatcaaataaaaaatgttgtttaattttctttgagttgtatttgtataaatctgttattaatatgcatcccaaaattgtatcatattgctaaaatgttgatagatcttgttatatgttattggtaataattgttatcctgttaaattattgtataccacagaaataatgaaatttctttgtcaattgcatcagtaatcatggctcttctaagtcttttgtcattcacagatgattattgttttacttggattcttttcaaaagtggtttgtaattggctacagcctaaaatctgcttgttcaaaaaaaaaaaaaaaaaatccatggaaagggccctgacagcacacacacttaaacacagttttctgataactttggaattcacaccgttggactagttaaaaacttctaaaataattttttaaaatctaataaattaatgaagattgctaatccaacatcaagcagaataagttaattacatggggctgaactgataaaatgccaaaataatattttcataacctttttttggtttgagacattgctgatactttttatgttttgttttccagagtcaagaaaattgtttttttcttttgagctgtacatagcttacagtaattagataaattacacttttgtgagaacaattgaaacactaacctttctctctacctgatgtctccagaatttggaaagtatttgtgagtattcttcacttttggcaatatagttatttgtacaaattcgataggaatctgttttcttttgtaacagaacacagttggatacactgattattttgccaaggctttcattggaatggcataattttttaatgaccagactgctttgaggatttgaagttgactttatagagcctataaaaagcctgttggaaaaattagcctgataccttgtctacacagtttccttacaaggttcctgaccttgcggtagtaaagaatgtcactctctggcaggcccaggagcctcaggatattttgggaaccttgacaagagaggagtgtatccaatttatacaggaattacaagtgcagtctgattgtgaatccttgtcttggcttcttagccttgagagtttttaaaagttgaatgtgaaattccttatgaaaaagttccaacaaagccaaactttaaaagagcctatatgtggtcaatcactatttttgctgtactttatgcaaataatcaggccaaatataataaaactaaaacttattttgcaaataaattggtcctgttatgatttgcctttaatagaaaagggggactggagagagaagaattatgtttcagaagaaaatgatagcatacctgttgttagattctagctttgtccattgtttttaagttgtaattatttgcctacatttgaactaaatcttgaattctttcctggctacaagtctccaagctaacatttaaatttttttctcctatgtttctgacttggaataagtagaagttaaaactatgcttttcttgaagccctgcagactggagcaagacaacttgaataaactatgggaaaaatcactacagcaacttatatataaacagcttttatgctttgttgatgtatggaatactcagaaagttcactgcaacacctgatttaaactacaaccaggagactctgtcagattaacactacaatctgaagaactacagagactctcaaaaaactagtgtatagtctacagtagatattaacctttgtttttcttctgttttcatagaaacaccttttattaaaaatctgtttgccgcttcatatatagagtcctagtccatctgtaatgccaccccctggaatgagacatagctgtttaactgaactgatctattctcgggactaagagactgataaaaaaagatataaaatgatatattcaaatttgctcctttctgcttatcccttttgtttttccactcctttgtctatc

SEQ ID NO: 3629 - DNA, 312 bp, Homo sapiens
  source 1..312: mol_type = other DNA
ggccgcgtgcggtggctcatgcctgtaatgccagcacttcgggaggcggagacagatggatcatttgaggtcaggagttcgagaccaggctggccaacatggtgaaaccccatctctactaaaaatacaaaaattagctgggcatggtggcatgtgtctggaatccctgctactcaggaggctgaggcaagaggatcacttggaacttgggaggcagaggttgctgtgagctgagatcacaccactgtactccagcctgggcaacagagtgatactctatctcaaaaaaaaaagaaagaaagaaagaaaaga

SEQ ID NO: 3630 - DNA, 299 bp, Homo sapiens
  source 1..299: mol_type = other DNA
tgttacgaactgaatgtttatgtccccccagtcagcaatgtgatggtgtttggaggtggagccttcagaaggtaattaatgcccttgtaagaagaggccagagagcttgcgcaccttcttcctgccatgtgaggagccaagaagccggctgtctgcaacctgcaagaggaccctcactagaagctagccatactggcatcctcatcttggctttccaacttccagaactgtgagaagtatatgtttgtggtttagtcaatggtctatggtaatttttttatagcagtcccagccaagac

SEQ ID NO: 3631 - DNA, 203 bp, Homo sapiens
  source 1..203: mol_type = other DNA
actctggaagagatagcttgtgttggaatcctggttccaccacttcctagtttcagcaatgttcctcatttctctaagcttcaacaacgttatatgaaaaaagcaggtagtgataatacctacttcacagaggtgaggtaaggattgagttaatctatgtggcctaattcccagcatgtgcaagcatgcaatacatgttggct

SEQ ID NO: 3632 - DNA, 310 bp, Homo sapiens
  source 1..310: mol_type = other DNA
gctgagtacggtgggtcacacctataaacccaacacgttgaaaggctgaggcagaaggaccccttaagttcaggagttcaagactagcctgggcaacatattgagacctcgtctctacaaaagaaattttttaattggctgggcatggtggcatgtgcctgtagtcccagctactcaggagggtgaggcaggaggatcccttgagcccaagaggtaaaggcttcagtaagccatgttcacactactgcaccccagcctgggcaacaggacaagaccctgtctcaaaaaaaaaaaaaagaagaagaaaaaa

SEQ ID NO: 3633 - DNA, 260 bp, Homo sapiens
  source 1..260: mol_type = other DNA
cagtgaaacccaatggaaaaagcatgacatttagaagtagaagacttagcttcaaatccctactccttcacttactaattttgtgatttgggtaagtaattgatcttgtctgaattttttgtttttttattttacaaagttccaataaataatccctgccctactcacctgattctttaggatattaggagactaaagtgaaataatttatgtgacaacattttgtgtaatgtaaaataatatcctagtgttaattgtta

SEQ ID NO: 3634 - DNA, 302 bp, Homo sapiens
  source 1..302: mol_type = other DNA
cctggaacagtggctcacacctgtagtgccagcactttgaaagacaaaggcaggaggatcacttcaggcaaggagtttgggaccagcctgggcaacagagtgaaaccctgcctctagaaaaaaatttttaaaaattagttgggcatagtggcatgcatctgtagtcccagctactctagaggctgaggtgggaggatcgcttgagcccaggcagtcaaggctgcagtgagcagtgatggacccactgcaccccagcgtgggtgacttagtgagaccctgtctcaaaaaaaaaaaaaaaaaaa

SEQ ID NO: 3635 - DNA, 817 bp, Homo sapiens
  source 1..817: mol_type = other DNA
aaaagatttgaagacacttaactaaagaatatatacaaatgtaaaataagcacatatgttcagcatccttaaggaaaagcaaattaaagtcatgatgtgatacaactgtctatgtatttgaatgactaaaattttaaaacactgagaataccagtgcttgctttcaaggacgcacagaaaatggaagtctttgctgcttggaatgcaaaatggtacagccattctggaaaacaatttgacaatttctcatataagtaaatatatacttaccatatgatccagcaatcccactcctgagtatttaccctagagaaataaaaaattaggttcacacaaaaataagcacatgaatgtctgtaaaagttctattcataatttgcaaaacctaaaacaatccacttgtccttcagcagctgaatggataaactgtggatcattcatacaatggaatactactgagcaataaaaaagaacaaactataaatatatgcaaacaacttgcatgaatctataggcaattttactgagtaaaagaggccagtctcaaggttgtatactataggattctatattttaacagtatattaatattttacaacattatcaaaaagacaaaactaaaataatggagaacacatcagtggttttcagggattagggacgggatgagcatgtgattataaaggtatatagcacaagagagttttgagagtgatcaaaatgttctgtatgtccattgtgttggtcattatataaacctttacatgtgtgtaagtcataaagctgtatgtagagaataattttattgcatgataat

SEQ ID NO: 3636 - DNA, 1495 bp, Homo sapiens
  source 1..1495: mol_type = other DNA
aacatagcaagtacatgggaataaatctagccaaaagatgtgcgagatatttataaaaacattataaaactttattataggacatcaaaggagatctaaacaaatgaagagataaacaacactgatagaagtacttttactctaaggtatcaatactccccaaattgatttatacatttaataggaccccatttcccaagtagaacatagtttttcatgcagcttgaccaggtgatttaaaaatttatatggaagagcaaagggccaaaaaatggccaagacactcttgcagcaaaacaaattggaaggggggatatcaaaacttactaagtttttagtgactgaaacagtatggtattgctataggaataaaaaattataccaatggactcaaagacctcaaaacagacccaagtgtggaaattaaaatatgacagattagtactgtagatcagtgaggaaatgatacattattttcaacaaatggtggtaggaaaaaaatccaaagaaactgggtctctacctacaacaaagaaagtaaatcaataaaaaaaaaattaacacaaatcagtttcaaagatctttcaaattatttgaaaaatacataagaaaatatctttatgaccttggggaaagagaagaatttcttaagcaagtacacaccagaaagatgaagaaattgaagaactacaattcattaaaatatatcaaagtaaaaagaacccacagactgggagacaataactgccattcatataaccaacagaaaaaaagtcactagaaaatattttaacattcttaaacaacaaaaaaatacaaccaacagaaaatcgtaaaaaagcatttcacagatgaagaaatttaatgatcaatacacatataaagatatgttcaacccccatcagtaatcacagtaatggaaattaaaaccccaatgagatatcattttctacctatcaaatcagtaaaatctaaaagactgaaaataccaaatgtggtagacaaagctggtgataaatcatcacagccatttaggaaaacggttttgggtaggttatgaagttaaagatgtgcttttcctatgacccagccagtttctacctggcatttattctagagtaactcttatgttccaggagacatcacaagagtgtttatagaaacactgtttataataaaaattggaccactcaattgttcatcaacaagagaatggataagttgggttggggcattttcacataattgactacagtgtagtagtaaaaagaatgtggccacacttactgaaatggatttgagaaaaatattgaatgacaaagcaaagcagaatatatacattgctaccattataaaagttaaaagacaagcaaaattaagtaacatgattaagtatacatatgtatacttatacaaagaaatgataaatacaaaattcaggggaatcagggtaaacaaagaagaactacagaaggtgcttcaataatattggtaa

SEQ ID NO: 3637 - DNA, 518 bp, Homo sapiens
  source 1..518: mol_type = other DNA
ccatactctgctggttgtccttttacctgactgctcctcagtctccttttcagacatatttgttctgcctgtgccttacatgtttgtgcttctcatggttaccctaggctctgctttaatttctccctactttctcctgaaattgctatctgtatcctcattattcttaacaatatcttcagcccagttcttgtgccagagcttcacattcatatagctcaattcctacttaacattgccacctacatgtctcaaattcagcaagcccaaaattgagtataccacgttctgccccaaatatatttcccccacacccctcagcttctttagcttggtaaataatacttgatggaggcagaggcctggaaatgcaacccttaactactgtttttccctgtacttcagtccagttgatagacaagccctattgaatcttaaacatcctagtgtttgtgtattttgctttatccctactaccacttcccttaaatactgttcactgtcatctttcacttaga

SEQ ID NO: 3638 - DNA, 49 bp, Homo sapiens
  source 1..49: mol_type = other DNA
caaataacttcattttctttgatggaggaggactaaaaagggaatcagg

SEQ ID NO: 3639 - DNA, 305 bp, Homo sapiens
  source 1..305: mol_type = other DNA
gaccaggctcggtggcttacgtctgtaatcctagcacttcggtaggccgaggcggtggactgcctgagctcaggagttctgagagcagcctgggcaacacggtgaaaccccgtctctactaaaatacaaaaaattagctgggcatggcggcgtgcacctttagtcacagctacttgggaggctgaggcagaactgcttgaacccgggaggcagaggttgcagtgagccgagatcgcgccactgccctccagtctgggcaacaaagcgagactccatctcaaaaaacaacaacaacaaaaaaacaa

SEQ ID NO: 3640 - DNA, 143 bp, Homo sapiens
  source 1..143: mol_type = other DNA
gccaggtgcggtggctcacgcctgttaacccagcactttgggaggccaaggtgggtggatcacctgaggtcagaagtttgagaccagcctggccaacatggtgaaaccccatctccactaaaatacaaaatttagccggtcgt

SEQ ID NO: 3641 - DNA, 267 bp, Homo sapiens
  source 1..267: mol_type = other DNA
gctgggcgccgtggctcacgcctgtaatcccagcactttgggaggccgaggtgggcggatcatgaggtaaggagttcgagagcagcctggccaacatggtgaaaccgtgtctctccaaaaaaatagaaaaaacatccctgtatggtggtgagcacctgtagtcccagttactcaggaggctgaggcatgagaatcgcttaaacctcggaggcggaggctgcaatgagctgagatggtgccactgcactccagcctgggtgacagagc

SEQ ID NO: 3642 - DNA, 184 bp, Homo sapiens
  source 1..184: mol_type = other DNA
ttcagatccatctatcatttcctagttgtatgtggttgtgtgggttatttctcctcttttacattgattttctcacctgcaagtgaataatagtaacactttatgagcagggttattgcaagtagcaaggagaaaatatatatttaccatttgccacaatccctggggaagtgcagtcaataca

SEQ ID NO: 3643 - DNA, 600 bp, Homo sapiens
  source 1..600: mol_type = other DNA
actggaattcgtcaagcctctggttctaatttctcatttgcaggaaatgctggcatagagcagcactaaatgacaccactaaagaaacgatcagacagatctggaatgtgaagcgttatagaagataactggcctcatttcttcaaaatatcaagtgttgggaaagaaaaaaggaagtggaatgggtaactcttcttgattaaaagttatgtaataaccaaatgcaatgtgaaatattttactggactctattttgaaaaaccatctgtaaaagactgaggtgggggtgggaggccagcacggtggtgaggcagttgagaaaatttgaatgtggattagattttgaatgatattggataattattggtaattttatgagctgtgagaagggtgttgtagtttataaaagactgtcttaatttgcatacttaagcatttaggaatgaagtgttagagtgtcttaaaatgtttcaaatggtttaacaaaatgtatgtgaggcgtatgtggcaaaatgttacagaatctaactggtggacatggctgttcattgtactgtttttttctatcttctatatgtttaaaagtatataataaaaata

SEQ ID NO: 3644 - DNA, 184 bp, Homo sapiens
  source 1..184: mol_type = other DNA
tcagatccatctatcatttcctagttgtatgtggttgtgtgggttatttctcctcttttacattgattttctcacctgcaagtgaataatagtaacactttatgagcagggttattgcaagtagcaaggagaaaatatatatttaccatttgccacaatccctggggaagtgcagtcaatacat

SEQ ID NO: 3645 - DNA, 267 bp, Homo sapiens
  source 1..267: mol_type = other DNA
ggctgggcgccgtggctcacgcctgtaatcccagcactttgggaggccgaggtgggcggatcatgaggtaaggagttcgagagcagcctggccaacatggtgaaaccgtgtctctccaaaaaaatagaaaaaacatccctgtatggtggtgagcacctgtagtcccagttactcaggaggctgaggcatgagaatcgcttaaacctcggaggcggaggctgcaatgagctgagatggtgccactgcactccagcctgggtgacagag

SEQ ID NO: 3646 - DNA, 184 bp, Homo sapiens; identical to SEQ ID NO: 3642
  source 1..184: mol_type = other DNA

SEQ ID NO: 3647 - DNA, 600 bp, Homo sapiens
  source 1..600: mol_type = other DNA
actggaattcgtcaagcctctggttctaatttctcatttgcaggaaatgctggcatagagcagcactaaatgacaccactaaagaaacgatcagacagatctggaatgtgaagcgttatagaagataactggcctcatttcttcaaaatatcaagtgttgggaaagaaaaaaggaagtggaatgggtaactcttcttgattaaaagttatgtaataaccaaatgcaatgtgaaatattttactggactctattttgaaaaaccatctgtaaaagactggggtgggggtgggaggccagcacggtggtgaggcagttgagaaaatttgaatgtggattagattttgaatgatattggataattattggtaattttatgagctgtgagaagggtgttgtagtttataaaagactgtcttaatttgcatacttaagcatttaggaatgaagtgttagagtgtcttaaaatgtttcaaatggtttaacaaaatgtatgtgaggcgtatgtggcaaaatgttacagaatctaactggtggacatggctgttcattgtactgtttttttctatcttctatatgtttaaaagtatataataaaaata

SEQ ID NO: 3648 - DNA, 912 bp, Homo sapiens
  source 1..912: mol_type = other DNA
agatttctgcctccagccaaaaagctgtaacagggactagatttaccctcctgtcaaaaaaagcagacaaaatatataaaacagtggttttcagacgttggacagcaagccttgctgataatgatccctgaaagaaaggaaacaaatgagatgggccctaagagcactccaccttactgcctggatggaatttccaggctgcacacagaggctggagatgttgttgagttgaagaaacaaagttcatctttcaaggaggctgagatggcgataattttgcaggtcagagtactggagaggaaagatctgcacagagagaactctctggggagctgcatagacttgctcatgagtcagcagctgagcgttgatcagcccttttgtgtgaggagactactggaagtcagggaaaaaatcactggaaagcagcagacagaacagtttccagagctcacacagagaacattcatgttctcaccagtctgtatggaaatacctcttaacatgacaggcattgaatagagtccacagtaatgggatcaaattaattctatcacaagaactggaaccagaggcaaaaagaaaagaaaagaaaaatctagactaacagctgttctagaccagcctaccaaagtttaaaagcaaattttgaagagattaaactatttccaagttaatgaagtatatttcagaacaaacccttaaatatttgagggaatacaaaaaaaaagaaaaagaaaaaatccagcccccaaaacaaagcaaaattcacaatgtctggcaaagcaaaattcatagtccctggcagaaattaccagggatgcaaaggaaaatatgacccataaaatggagaaaaatcacagaatggaaacatacccagaaataacccagttggtagaattaatagacaaa

SEQ ID NO: 3649 - DNA, 267 bp, Homo sapiens
  source 1..267: mol_type = other DNA
ggctgggcgccgtggcttacgcctgtaatcccagcactttgggaggccgaggtgggcggatcatgaggtaaggagttcgagagcagcctggccaacatggtgaaaccgtgtctctccaaaaaaatagaaaaaacatccctgtatggtggtgagcacctgtagtcccagttactcaggaggctgaggcatgagaatcgcttaaacctcggaggcggaggctgcaatgagctgagatggtgccactgcactccagcctgggtgacagag

SEQ ID NO: 3650 - DNA, 76 bp, Homo sapiens
  source 1..76: mol_type = other DNA
atttctctgtggctcagttttaccacccataaagcggagacagtaatttacggttatcctttctgacccacaaagt

SEQ ID NO: 3651 - DNA, 139 bp, Homo sapiens
  source 1..139: mol_type = other DNA
tgtcatgggctcgggggagggggaaatggggagcgctgttgtttgaatggtatagtttcagtttgggactgagaacaaattctggagatgaatggtggtgatggctgcacagcagtgtgagggcactttatgccactga

SEQ ID NO: 3652 - DNA, 634 bp, Homo sapiens
  source 1..634: mol_type = other DNA
ttttcactatcccctgaatttccccacttatttttgtctttcactatcgcaggccttagaagaggtctacctgcctccagtcttacctagtccagtctaccccctggagttagaatggccatcctgaagtgaaaagtaatgtcagattactcccttcagtgatttcttgtagaagtgccaatccctgaatgccaccaagatcttaatcttcacatctttaatcttatctctttgactcctctttacaccggagaacggctccagctgttctagctctctttcagttctttgaaccttcccaccttagggtctataaggttccctctgcccaaattgttctactctcccttcttcttcaacacatccttcagtttaagcacttgcttctctcagtttaaactccacttccttagggatgtctctgtgacctccctgtgctggattagcttccctactctatgctcttgtaaaacactatctacttcctttgtcataaactcatcattttcctataaacattaatattgtcctcctgctagaatgtaagctccgtgagagcaaggatcctcctgtttaccctgtacctccaatgtctggcacttgtaggtgctcaaatattcgttgaatgaatgaa

SEQ ID NO: 3653 - DNA, 822 bp, Homo sapiens
  source 1..822: mol_type = other DNA
taggaaaagcctggtgaaaaccttgaaattgcccccctctgccctgacaagaaaatgagaagcaatgcttcatcacaggaagaatggcagagattggggctaccctcaaagacataaaggaggctaggatggcagtcccttcgtatccccatttagtgtaccagtctgtcttctagaaaaagccagttgggtcatgcattttatggtggactatcatgaccaagtattaaccccaaccacaactgctgttccagatgcagtatttttactacagcagatcaacatggtctctggtacttggtgtaacactactaaattggaaaatgcattctcttcaatcccttctagaaaggagcatcaaaagcagtttgctgtcacttagaacagacagatacatacattcactgtcatgccctcatggctagattgcaataaagcttaacgggattgggatcatcgggatattctataggaaatctcaaggtttcactgtgctggcaacatcatttaattgtgcctgggggacaggaatggtaagcattctggtcaggtatatctggatcagagagtggaagaggaagcttacacacaatcaaggctttgctgcggtcaataaagctttcaggggccccgtggtttgagacatgccaggtcactcctccaaggggcgaacaaatgtgtgcactttctacctcctaccactaagaaagtggtacaatgcccagtggacctcttcagatttgggagaccatatccaccacacttgtgaatactgcttcaactcatttagtagtgagtcagaacacttctggttttgagtgg

SEQ ID NO: 3654 - DNA, 1251 bp, Homo sapiens
  source 1..1251: mol_type = other DNA
ggaagaaatttctaagcagcaaagtgttcaagaggtgacttgggtgctattaaaagcattcagttttatgtattcacagagatatggtttgaaattgaaacttatgtttaaaaggaaagcagaaaataaaagcttggaaaatttgcagcttcatgatgtgatagaaaagaaaaactcattttctgaggagaaattcaagctggctgcagaaatttacataagtaacgaggagccaaatgttattcactcagacaagggggaaaatgtctccagggcatgtcagaaacctccatggcagtcccttccatcacaggcctggaggcctagaaggaaaaaaactgtttcctgggccaagtccagggtccccctgctgtgtgcatcctcaggactgcatcccagacactccagcaatggctaaaaggggccatggtacaactcaggatgttacttcagatgatgcaagcccccagccttggccacttccatgtgatgttgaccctgtgggtccacagaaaacaaaaatcgaagcttggaaacctctgcctagatgtcagaggatgtatggaaacgcctggatgtctaggcagaagtctgctgcaagtgtggagccctcatggagaacctctgctatggcagtgcaaaagggaaatgtgggatcagagtccccacacagggtccccacaggggcactgcctggtggagctgtgagaagaggactaccattctccagatcccagaatggtagattcactgacagcttgcaccatgtgcctggaaaagccacagacactcaagccagccatgaaaacagctggggtggggggctgtacactgcaaagccacagggttggagctgcccaaggtcatggtagcccacctcttgcatcagtgtgacctggatgtgagacatggagtcaaaggagatcatttgggaactttaaggtttaatgactgccctattggatttcagacttgcatgcggcctgtagccccttcattttgccaatttctcccacttggaatgggtgtatttacccaatgcctgcacccccattgtatctaggaagtaactaacttgctctttattttacaggctcataggtagaaggaacttgccttgtctcagatgagactttgaacttaaacttttgggttaatgctggaatgagttaagactttgagggactattggaaaggcatgattgtgttttgaaatatgaggatatgagatttgagagggggaggggcaga

SEQ ID NO: 3655 - DNA, 248 bp, Homo sapiens
  source 1..248: mol_type = other DNA
aataattccagctcctggccccacttttcacagcaatgaggctgaacttatatggaaaagcagaagacccagaataattaaaacaactttgaaaaaagaataacagaattggaagaccttgtcttctcaatttcaaaacttactaaagagctacaatgatcaaaacagtgtggtactcacatcagggtcagcagatagatcaacagaacagaattgagagcccagaaacaaaatctgtacttacagtc

SEQ ID NO: 3656 - DNA, 284 bp, Homo sapiens
  source 1..284: mol_type = other DNA
ggccgggcacagtggctcacacctataatcccagaactttgaggccaaggcagacagattgcttgagctcaggagttcgagatcagcctgggcaacatggggaaatccaatctctacaaaacatacaaaaaattacctaggtgtgatggtgcacacctatggtcccagctactcaggaggctgaggtggggggatcatttgagcccaggaggttgaggttgcagtgagccaagattgcaccactgcactccagcctgggcgatgacatagctaagactgtttca

SEQ ID NO: 3657 - DNA, 120 bp, Homo sapiens
  source 1..120: mol_type = other DNA
gaaatcgctactaatccgcacaccctcatgtttacagtataattaccaataggttcatcatgaggaccctgaggcacagagagatgatcttcctcctgagtcttccaaggaagattcaat

SEQ ID NO: 3658 - DNA, 153 bp, Homo sapiens
  source 1..153: mol_type = other DNA
agccagtgtcttgaactccatggacagagcacttaaggaatggaaccgggggcagaaaatctgagctttaatcccagttctactgctaagtagatttgtgccattgtggacaagttgcctagcatttatgaacttcagttttattatctctaa

SEQ ID NO: 3659 - DNA, 207 bp, Homo sapiens
  source 1..207: mol_type = other DNA
atagcaccatattattttccctcctacttagcacagcttgtaatacaaatttgtgtgactatttcatcaatgtctgtctcctcaccttgactgagagctccatgggagaccgtatagggactgtgtcttcatttgcttatttttattaaccttagtactgacacattaccagatcccattagacaaacaatatatttgtgaaatgag

SEQ ID NO: 3660 - DNA, 1094 bp, Homo sapiens
  source 1..1094: mol_type = other DNA
caacagagctgggggtagaggagagagctgttctgcgttacagcctgagctggacagttgtctcaggaaaaacacctgtaagtacaggcagaggcaggaggatcctggagaggagtgcatgctggtcatggtctgtaatatttgtacaaagaagaaatgcaagttctatctaattctctaggattacaggcagaaacttggacagtaaagacagactatttcttcccaggctagcatcccacgccagatgcatggctgctcagggaccatggacccagggtggaggttatacacctgaacctgacttccaggttctagatgagcgggtaaaattgccagctcccaagtgggcagccttgctaaggagtccctacaaccctctgctggcaaatgctgaacctggacagggagtttcagggattcctgaacctccttcttatacaggaaggaggaaacaaacagagctctaaatgggacctttgaaaagactctgcagcacaaggaaaaatgagcactgtcttgagatttggtggaaaaaatatatctctaaaaatgactttccataggaacaaaataaaattttagaaaatgacacttggctcctataaaagatgcagacgttgccactatgaaacgacagagaacaataaaaacagggtgggctgaatgacaggcagagatttagaaagaagtccccagtggaatgaacaaaagaattcaaggaaatacaaaatgcaatagcagaatttaaatctgcatttaaggcactcaagagcagaacaaatcctgcagaatattgacccagtgatgtacaggacaaatgtgaaatgttctcctagaatacacagaagaagatcgaagaggaaatgatgagttggaggatgagatctaagaagttccattttaagaattatacatattcttaaggctgaaatcagaacaggaagagaaacaatgataagagcacatgggaaagaactttgctagcggaaaaaagtctccaggctgaaagggttcagagcatttcagaaaaaaattaatgaaaaatacttgtatctcaacatttccttacaccgtattttaatttcagatag

SEQ ID NO: 3661 - DNA, 284 bp, Homo sapiens
  source 1..284: mol_type = other DNA
gtggctcttgcctataatcccagcactttgggaggctgaggagggcagattgcttgagcccaggagttcaagaccagcctgggcaacatgggaaaacctcgtctctacaaaaaatacaaaaattagctgggcatggtggcatgcacctgtagtcctagctacttgggaggctgaggcaggaggactgtttgagcctctggaggcggaggttgcagtgagctgagaccgcgccactgcactccagcctgggtgacagaacaagaccctgtctcaaaaaaaaaaaa

SEQ ID NO: 3662 - DNA, 171 bp, Homo sapiens
  source 1..171: mol_type = other DNA
cagtgttcttcaaatgaaggctgcaatactttactgtagcatgaaatggtcaaagccagtgtttcttaatagtatagaataaaacagactagaaaatgtcataatgcattgcagataataaggataggcattgttttgttaaacttttgtttcaattttagatgtatgcat

SEQ ID NO: 3663 - DNA, 300 bp, Homo sapiens
  source 1..300: mol_type = other DNA
ggccaggcacggtggcttatgcctataatcccagcactttgggaggctgaggtgagcggatcacaaggtcaggatttcgagaccaccctggacaatatagtgaaaccccatctctactaaaaatacaaaaaattagccgggcgaggtggcaggcacctgaagtcccagctactcgggaggctgaggcaggagaatggcgtgaaccccggggggcggagcctgcagtgagctgagatcgtgccactgcactccagcctgggcgaacgcgagactccatctcaaaaaaaaaaaaaaaaaaaa

SEQ ID NO: 3664 - DNA, 190 bp, Homo sapiens
  source 1..190: mol_type = other DNA
gaaagaggctttggagactggcaaacataagttcaaatcccagccctacaacttgctaactatgaccttgggctgattatttaatctctctgaccctcaggttcctcaatcgtacatgggaataacagtactcacaccccatatggctgttgtgaggattaagtgaggtcttacaggtaagaagcctggc

SEQ ID NO: 3665 - DNA, 214 bp, Homo sapiens
  source 1..214: mol_type = other DNA
agagaagatgagcctccatgccagatgcatgtgggtttgagtcacaactttggcactcacaagccacctggctttggatcaatcacttaatctctctataccctggttttccatgtgtacagtgaagtcagtcatacagctgccattgagaaatggaatcaatgtcataataatactcaaacaatacataataagcagtcaatacatggtggct

SEQ ID NO: 3666 - DNA, 309 bp, Homo sapiens
  source 1..309: mol_type = other DNA
gctcagcgcagtggctcacacctgtaatcccagcactttgggaggctgaggcgggcagatcacttgaggtcaggagttccagaccagcctggccaacatgatgaaaccctgcctctactaaaaatacaaaaattagccaggcatagtagtgggcgtctgtaatcccagctattctggaggctgaggcaggagaattgcttgaacccgggaggcggaggttgcagtgagccgagatcgcgccactacactacagcctgggtgacaaagcgaaattccgtctcaaaaaaaaaaaaaaaaaaaagaaagaaa

SEQ ID NO: 3667 - DNA, 97 bp, Homo sapiens
  source 1..97: mol_type = other DNA
tgccaaatgctatactgtgtcatggtgatgcaagtcactaaatttctcagtttttgctgattgctaagggaaataacagtatttccacaatagggtt

SEQ ID NO: 3668 - DNA, 309 bp, Homo sapiens
  source 1..309: mol_type = other DNA
gccgggtgtggtggctcacgcctatcatcccagcactttgggaggctgaggcgggcagatcacttgaggtcaggaggttgagaccagcctgaccaacatggtgaaaccccatctctactaaaaatgcaaaaattagaaaggtgtggtggtatgcacctgtaatcccacctactaaaggaggccgaggcaggagaattgcttgaacctgggagtcggaggttgcagtgagccaagattgcgccactgcactccagcctgggtgacagaatgagactctgtctcaaaaaacaaaaacaacaaaaaacaaaa

SEQ ID NO: 3669 - DNA, 437 bp, Homo sapiens
  source 1..437: mol_type = other DNA
attctttgaaattcctaccactgagatgggatatatgctccctccatttgaatctgggggggcttgggactttagtggaagtgatgttatgagacttctgagactaggtcataaaatgtaactgcttctgcctggtcctcttgggacagtcactcctagtacctagccaccatgctgtggggaagctatgtgtagacatgttccagccccagcactagctgaggtcctagcatcaactgccagaaatactaaggaagcctttgagattatgccagtcgcggccacaatctgatgatgactataactgcatgagaacccgaataagaactgtctggctgagcccagtcagtacttaggataatgagaaataacacaatgactggtgttgtttaaagtcactgagttttggagtgttttccacacagcaatcaataacc

SEQ ID NO: 3670 - DNA, 371 bp, Homo sapiens
  source 1..371: mol_type = other DNA
tcccctgtttaaaacctcctgaggacctcacatgcttctggataaagctcaggctcttcaacatggtttagaaggtccttcctaatctggcccacatttgtccatccagctccaactcttgctactctacgcccctcttcccctcttgtggaatggctaattcctactcatcattcaggtcttggcttagacatcttttcatctgagaaggctttctggtctagtctcacctggttaggtgaactccccatgtgccccatgtacctcatttatcaaagtgcttatcatatgcctgtcactgtctgttttcttcactagactcaggtgccatgtctgtcctttctgctctgtttgctgggtgcctagcatgg

SEQ ID NO: 3671 - DNA, 99 bp, Homo sapiens
  source 1..99: mol_type = other DNA
ggaggcaggagacatgagatgcagccggctctgaccccaaagagccatgggacctgagtaagtgacttcgcctctctgttttggtctctcggtaaagtg

SEQ ID NO: 3672 - DNA, 288 bp, Homo sapiens
  source 1..288: mol_type = other DNA
gccaggcacaatggctcacacctgtaatgccagccctttgggaggccgaatgggcagatcacttgaggtcaggagtttgagaccagcctcgccaacatggtgagaccctgtctctactaaaacgataaaaaaaaaaaaaaaattagccaggcttggtggcacacgcctgtaatcccagctactcagatggctgaggcaggagaactacttgaacctgggaggtcaaagctgcagtcagccaagatcttgccactgtactccagcctgaagagcgagactctgtctcaa

SEQ ID NO: 3673 - DNA, 959 bp, Homo sapiens
  source 1..959: mol_type = other DNA
tgtggggaaaagcaagagagatcagattgttactgtgtctgtgtagaaagaagtagacataggagactccattttgttatgtactaagaaaaattcttctgccttgagattctgtgaccttacccccaaccccgtgctctctgaaacatgtgctgtgtcaactcagagttgaatggattaagggcggtgcaggatgtgctttgttaaacagatgcttgaaggcagcatgctccttaagagtcatcaccactccctaatctcaagtacccagggacacaaaaactgcggaaggccgcagggacctctgcctaggaaagccaggtattgtccaaggtttctccccatgtgatagtctgaaatatggcctcgtgggaagggaaagacctgaccgtcccccagcccgacacccgtaaagggtctgtgctgaggaggattagtaaaagaggaaggaatgcctcttgcagttgagacaagaggaaggcatctgtctcctgcctgtccctgggcaatggaatgtctcggtataaaacccgattgtatgctccatctactgagatagggaaaaaccgccttagggctggaggtgggacctgcgggcagcaatactgctttgtaaagcactgagatgtttatgtgtatgcatatctaaaagcacagcacttaatcctttacattgtctatgatgccaagacctttgttcacgtgtttgtctgctgaccctctccccacaattgtcttgtgaccctgacacatccccctctttgagaaacacccacagatgatcaataaatactaagggaactcagaggctggcgggatcctccatatgctgaacgctggttccccggttccccttatttctttctctatactttgtctctgtgtctttttcttttccaaatctctcgtcccaccttacgagaaacacccacaggtgtgtaggggcaacccacccctac

SEQ ID NO: 3674 - DNA, 65 bp, Homo sapiens
  source 1..65: mol_type = other DNA
tctagattatggatcttcagataaattctgccattttcatttaacttcctgaaagtcagggtcgg

SEQ ID NO: 3675 - DNA, 80 bp, Homo sapiens
  source 1..80: mol_type = other DNA
gctcttgagggcaggtctctgtcttattccactctgtacactcagcacctattggagtggccacagcgcataatgggtgc

SEQ ID NO: 3676 - DNA, 311 bp, Homo sapiens
  source 1..311: mol_type = other DNA
gccaggcgcggtggctcacgcctgtaatcccagcactttgggaggctgaggcgggtggatcacgaggtcaggagatcgagaccatcctggctaacacggtgaaacccgtctctactaaaaatgcaaaaaaaattagccgggcgtggtggcaggcacctgtagtcccagctactcgggaggctgaggcaggagactggcgtgaacccaggaggcggaccttgtagtgagccgagatcgcgccactgtgctccagcctgggcaacagagcaagactccatctcaaaaaataaaaataaataaaaaataaaaaa

SEQ ID NO: 3677 - DNA, 853 bp, Homo sapiens
  source 1..853: mol_type = other DNA
gcaaactaaaaacaaaattctaagctccaaaaccgtctgaatggacccctcctctcaactaagggcattctaaagtaattcaggccatgatgggaagagggggtcagacatgtctcattacacattcctccctttggaactcaggaacaattgagcagcattaacattaaaacagatcttaaggctttttgtaacaataagacaccaaattccagctttactctagtatggcatcacaggacagatagcgggatctgaaagaaataaaagcattttactctaaaatatatttctttacatattttgaattggccctgcaaagatgtctcttaaggggaaaatctatattctgtagagaaccctcttccctgtccaggtctttttcctgatccactagaaaattaactaggagtctgggacctttttaagtctgataagaaacatttacaatctattctctctgaagcctgctacctggaggcttcatctgcctaataagaaccttgatctccacaacccctttattttaacccagacacactcccttgtattgattccaggtcttaagataaactctttcaacgaactgccaattggaaaacctcctataacttggaactgtccccagcccgctttgggttgtcctgcctttccagatcaaaccaatgtacatcgtacatgtattgattgatgtcttctgtctccctaaaatgtataaaaccaagctgtagcctgaccacctcgggcacatgtcatcaggacttcctgaggctgtcacaggcatatccttaaccttggcaaaataaacttctaaactgattgagacctgtctcaggtactttcttggtttaca

SEQ ID NO: 3678 - DNA, 4335 bp, Homo sapiens
  source 1..4335: mol_type = other DNA
ggtggctggcaagatggccgaataggaacagctctggtctccagctcccagcgagatcaatgtagaaggtgggtgatttctgcatttccaactgaggtacccagctcatctcagtggatgcagcccatggagggtgagcagaagcagggtggggcatcacctcacccgggaagcacaaggggtcgaggaactccctgccttagccaagggaagccatgaagaacagtgcattccagcccggatactacgcttttcccatggtcttcacaacctgtagaccaggagattctctcgggtgcctacaccaccaggccctgggtttcaagcacaaaaccgggcagccatttgggcaggcactgagccagctgctggagtttttttttcataacccagtggctcctggaacaccagcaagacagaaccattcactcccctggaaagggggctgaagccagggagccaagtggtctagctcagtggatcccacccccaaggagcccagcaagctaagatccactggcttgaaattctcgctggcagcacagcagtctgaagtcaatctggaatgctcgagcttggtggggggaggggcgtccgccattactgaggcttgagtaggcagttttcccctcacggtgtcaacaaagcctccaggaagttcaaactgggtggaacccaccgcagctcagcaaagccactctagcccgactgcctctctagattcctcctctcttagcagggcatctctgaaagaaaggtagcagccccagtcaggggcttatagataaaactcccatctacctggaacagagcacttgggggaaggggcagttgtggacacagcttcagcagacttaaacgttccagcctgccagctctgaagagagcagcagatctcccagcacagcactcaagctctgctaagggacagactgccttctcaagtgggtccctgacccccatgcctcctgacttgggagacacttcccagcaggggtctacagacacctcatacgagagaactccagctggcatctggcgggtgcctctatgggatgaagcttccggaggaaggaacaggcagcaatctttgctgttctgcagcctctgcttgtgatacccaggcaaacagggtctggagtggacctccagcaaactgcagtagacctgcatcagagaggcctgactgttagaaggaaaactaacaaatagaaaagtatagcatcaacatcaacaaaaaggacgtccacacagaaaccccatctgaaggtcaccaacatcaaagacgaaaggtagataaatccacgaatatgagggaaaaaccagtgcaaaaaggctgaaaattccaaaaaccagaacacctcttctcctttaaaggatcataagtcctcaccagcaagggaacaaaactagacagaaaatgagtttgactaactgacagaagtcggcttcagaaggtgggttataacaaactcctccaagctaaaacagcatgttttaacccaatgcaaggaagctaagaaccttgaaaaaaggttagaggaatttctaactagaataaccagtttagagaagaacataaatgacctaatggacctgaaaaacacagcacgagaacttcttgacgcctacacaagtatcaatagccaaattaatcaagcggaagaaaggttatcagagactgaagatcaacttaatcaaataaagcatgaggacaagattagagggaaaaaaatgaaaaggaacaaacaaagcctccaagaaatatgggactatgtgaaaaggccaaatctacgtctgattggtgtagctgaaagtgacagggagaatggagccaagttagaaaacactcttcagtatattatccaggagaacttccccaacctagcaagacaggccaacactcaaattcaggaaacacagagaccaccacaaagatactccttgagaaaagcaaccccaagacacataatcatctgattcaccaaggttgaaatgaaggaaacaatgttaaggacagccagagagaaagctcgggttgcccacaaagggaagcccatcagactaacaacggatctctttgcagaaaccgtacaagccaggagagagtgggggccaatattcaacattcttaaagaaaagaattttcagcccagaacttaatatccggccaaactaagcttcataagcaaaggagaaataaaatcttttccagagaagcaaatgctgtttgtcaccaccaggcctaccttacaagagctcctgaaggaagcactaaatatggaaaggaaaaaccaataccacccacagcaaaaacataccaaattgtaaagaccgtcgacactgtgaagaaactacatcaactaacaggcaaaagaaccagctagcatcataatgacagaatcaaattcacataaaacaatattaaccttaaatgtaaacaggctaaatgccccaattaaaagacacagactggcacattggataaagagtcaagacccactggtgtgctgtattcaggagaccatctcatgtgcaaagacacatataggctcaaaataaagggatggaggaatacttaccaagcaaatggaaagaaaaaaaaaagcaggggttgcaatcctagtctctgataaaacagactttaaaccaacaaagatcaaaaaagacaaagaaggccgttacataatggcaaagggatcaacataacaagaagagctaactatcctaaatatatatgcacccaatacaggagcatccagattcataaagcaagttcttagagacctacaaagagacttagactcacacacaataatagtgggagactttaataccccactgtcagtattaaacagatcaatgagacagaaaattaacatattcaggacttgaactcagctctggaccaagcagacctaatagacatctacagaactctccaccccaaatcaacagaatatacattcttctcagcaccacattgcacttattctaaaattgaccacataattggaagtaaaacactcctcagcaaatataaaagaatggaaatcataacaaacagtctctcagaccacagtgcattcaaattagaactcaggattaagaaattcactcaaaaccacacaactacatggaaactgaacaacctgctcctgaatgactactgggtaaataatgaaattaagtcagaaataaataacttctttgaaaccaatgagaacaaagacacaacatagcagaatctctgggacacagctaaagcagtgtttagagggaaatttacagcactaaatgcccacaagagaaagtgggaaagatctaaaattgacaccctaacatcacaatcaaaagaacaagagaagcaagagcaaacaaattcaaaagatagtagaagacaagaaataactaagatcagagcagaactgaaggagatagagacatgaaaaaacccttcaaaaaatcagtgaatccaggaactggttttttgaaaagattaacaaaatagaccactagccagactaataaagaagaatagagacaagaatcaaatagatgcaataaaaaatgataaaggggatatcaccactgatcccacagaaatacaaactaccatcagagaatactataaacatctctatgcaaataaacttgaaaatgtagaagaaatggataaattcctggacacatacaccctcccaagactaaaccaggaagaagtcgaatccctgaatagaccaataacaagttctgaaattgagacagtaattaatatcctaccaaccaaaaaaagcccaggaccagaaagatttgcagccgaattctaccagaggtacaaagaggagctggtaccattccttctgaaactattccaaacaacagaaaaagaaggactcctccctaactcattttatgaggctagcatcatcctgataccaaaacttggcaaagacacaacaaaaaaagaaaatttcaggccaatatccttgatgaacatcgatgtgaaaatcctcaataaaatactggtaaaccaaatccagcagcacatcaaaaagcttatccaccacaatcaaatcagcttgatccctgggatgcaaggctggttcaacatatgcaaatcaataaacataatccatcacataaacagaaccaatgacaataaccacatgattatctcaatagatgcagaaaaggccttcaataaaattcaacaccccttcatgctaaaaactctcaataaacttggtattcattgaatgtatctcaaaataataagagctatttatgacaaacccacagccaatatcgcactgaatgagcaaaagctggaag

SEQ ID NO: 3679 - DNA, 384 bp, Homo sapiens
  source 1..384: mol_type = other DNA
tgtatccttagtcctggtctctgatacattctagacctgcatttctaaaagtttgtttatcatatctacctcagtgtcttctggtaccttcaaatcctataatcagacatttccccaaacctgccccacttcctgaattccctatgtataaatgagtagcagcagcatctacccagtcaccacgttgaaaacctaggaattatcttaacttcttcctttctttgtctgccacacccagtttgtcaccaagctctgccaagtactttgtgaaatgaccctcaaattctcctactcttgcttatcttcatcagcactgcctatcactctttatcatctcttgccaggatttttttccagtggtcttctaacttgtattcatattcc

SEQ ID NO: 3680 - DNA, 295 bp, Homo sapiens
  source 1..295: mol_type = other DNA
agctggaggccattatccttagcaaactaacacagaacagaaaaccaaatacatgttctcatttagaagtaggagctaaatgatgagaactcaaggacacaaagaaaggaacaacagacactggggcctacttgagggtggagggtgggaggagggagaagagcagggaaaataactactgggtactaggcttagcacctgggtgacaaaataatctgtacaacaaaaccacttgacatgagtttacctatataacaacctgcacatgtacccctgaacctaaaagttaaaaaaa

SEQ ID NO: 3681 - DNA, 2224 bp, Homo sapiens
  source 1..2224: mol_type = other DNA
catcatccctttatgataaaaaccctcaacaaaataagcatagaagggacctacttcaaagtaataaaagctatatatgacaaacacacagccaacatcacactgaatggggaaagcctgaaaacattccccctgagaactggaacaagacaaagctccccattttcactacttctatccaacatggtactggaagtcccagacagagcaatcaggcaagagaaagaaataaagagcatccagattggaaaaggggaagtcaaactgttgctgttcactgatgatatgattgtacacttagtaaaccctaaagactccttcaaaagtttcctagatatcattaaagaattcagtaaaatctcaggttacaaaatcaatgtacacaaatcagtagcactgctatacaccaacaacaaccaagctgagaatcaaatcaagaactcaatccctcttacaacagctgcaacaacaacaacacacacacacacaaactaggaaaatacttaaccaaggaggtgaaagctctctataaagaaaactacaaaacactgctggaagagatcatacgtgacagaaacaaatggaaacacatcccatgctcatggacgggaaaaaatcaatattgtgaaaataaccatactgcacaaagcaatctacagattcaatgcaattcccatcaaagtaccatcataattcttcacagagctagaaaaaatattaaaattcatatgaaaccaaagaagggcccacatagccaaagcaagactaagcaaaaagaacaaatctggaggcatcacattacctgacttcaaactatactgcttggctatagttaccaaaacagcatggtactggtataaaaataggcacataggccaattgaacagaatacagaatacagaaataaagctaaatatttacagacaattgatcttcaacaaagtatacaaaaacataaattggggagaggacaccttattcaataaatggtgctgggaaaactggcaagccatatgtagaagaatgaaagtggatccccatctctcaccttacacaaaaatcaactcgagatggatcaaagacttaaatctaagacctgaaatgataaaaaaaattctttaagataacttcaaaaaaaaataaacaactcttctggacattggcttaggcaaagaattcatgactaagaccctaaaaacaaatgcaacaaaaacaaaaataagtaaatgggacataattaaactaaaaatcttctgcacagcaaaagaaataatcagcagagtaaacagacaacccacagagtgggagaaaatcttctcaaactgtgcatcagacaaaggactagtatccagaatctacaaggaactcaaacaaatcagtaagaaaaaaaaaatgatcccatcaaaaagtggccaaaggacatgaatagacaattctcaaaagaagatatgcaaacagctgaccaacattatgaaaaaatgctcaatatcactaatcatcaaggaaatgcaaattaagaccacaaagagataccgccttactcctgcaagaatggtcataactaaaaagtcaaaaaataatagatgttggcatggatgtggtgaaaagggaacacttttacactgctggtggaaatgtatatgaatataaccattatgaaaaacagtatgaagattacttaaagaactaaaggtgaactaccgtttgattcagcaatcctactactgggtatctagccaaaggaacagaagtcattatatgaaaaagacacatgcacatgcctgtttgtagcagcataatttgcaaatgtaaagatatggaacaaaccttaatgcccattgagaaatgagtggataaagaaaatgtggtatatatacaccatggaatactactcagccttcataaaaagaaacaaaataatgtcttttgtagcaacctggatggagctggagaccattacttcaagtgaagtaactcaggaatggaaaatcaaatatcgtttttctcacttataagtgggagctaagctgtgaggatgcaaaggcataagaataataaactttggggacttgaggagaaggttgggagggggatgagggataaaagaccacattttgggtacagtgtacactgcctggttgacgggtgcactaaaatctcaggaatcaccattaaagaacttacccatgtattcaaaaactacctgtaccccaaaaactattga

SEQ ID NO: 3682 - DNA, 402 bp, Homo sapiens
  source 1..402: mol_type = other DNA
gatacggtttggatgtgtgtcccctccaaatctcatgttgaaatgtgattctcagtgttggaagtggggctggtgataggtgtttggttcatgagggtagatcccttatgaatggcttggtgctgtctttgtggcaataagtgagttctcactatctgagttcacacaagagctggttgtttaaaagagcctgtcatctcttttgctccctttctcaccatgtgatatgctgctccccttctcttctgccatgaagaaaagcttcctgaggccttcaccagaagcagatgctggtgccgtgcttctacagcctgcagaactgtgagccaaataaagttctttcctttataaattacccagcgtcaggtattgttttatagcaatgcagaacagactaacaca

SEQ ID NO: 3683 - DNA, 500 bp, Homo sapiens
  source 1..500: mol_type = other DNA
tagtatccctttatctatgggtttgctttccatggttttagttaactgcagtcacctcatgtccaaaaatattaactgaaaaattccagaaataattcattagttttaaattgcacatcattttgagcagcatgatgaactctgccattctgctccatcttgcccaggatgtgagtcctccctttgtccagtgtatctatgctgtatatgctacccacctgttagtcacttagtagacttcttggttatcagatcaagtgtagcagtatcacagtgtttgtgttctttactttacttaataatggcttggagtgcaagagcggtgatgctggcaatttggatatgcgaaagagaagctgtaaagtccttcctttaagtgaaaacataaaagttctcaataaggaaagaaaaaacacagtatatacagggtccagtactattctcagtttcaggcatccactgggggtcttggaacacattccctgcagataagtggggat

SEQ ID NO: 3684 - DNA, 176 bp, Homo sapiens
  source 1..176: mol_type = other DNA
aaaatttaaatagctggaccacattaaaagttttattgggctaaaatcaaaaacatctgacaagtttttgacttgtctttctcatgatttaatgtcccagcagagcaactgggaacctaattctgaccaaaaaggaggaattgtttggctaattggaagtgacagaaaccttggga

SEQ ID NO: 3685 - DNA, 439 bp, Homo sapiens
  source 1..439: mol_type = other DNA
gtagaatggtggcccctgcaaaaggtaagccttcctcctaatcctagaatcgtggatggtaccttatttggataaaaaggtctttgcagatgtaattaagaaccttgagatgaggagatcatcctggattatctggtggactgtaaagtcaatgacatgtattcatatatgacagaagagaagacatggagaagaggagggagtagttgtgaccgtggaggcagagaatggagtaatgtgatcataaatcaaggaatgctgacagccactaaagctggagaaggccaaggacagatattcaatcctcccgtagaagtacagccctgctaatgcattgattttggacttctggcctcagaactgtaagagaataaatttctattgttttaagccttcagtttgtggtagtttgttacagaaaccctgtaaagttaataca

SEQ ID NO: 3686 - DNA, 2898 bp, Homo sapiens
  source 1..2898: mol_type = other DNA
aacaatcccagagagacaaagatatgtgaccattcagacagataattcatgttttattttgaatttcactgagtttccttaaaacagctatttgtctgacagatagctgttttcaggagactcagtgaaattcaagataacacagagaatgaattcagaatcctaacagataaatttaacaaacagattgaaataattaaaaagaatcaagcagaaattctagagttgaaaaatgcaattcacatactgaagcatgcatcagaatctcttaacagcagaactgatcaagcagaagaaagaattcgtgagctttaagacaggctatttgaaaatatgcagtcagaggagacaaaagaaaaaagaataaaaaacaataacacatgcctacaagatctagaaaatagtctcaagtggacaaatctaagagttattggccttaaagaggaggtagagagagataaggctggaaagtttactcaaaaggataatagtagggaacgttccaaacctagagaaagatatcaatattcaagtacaagaatgctgtggaagaccaagcagatttagcccaaagaagacacctcaaaacatttaatattcacacttccaaaggtcaagaataaaggaaggatcctaaaagtatcaagagaaaagaaacaaatagcatacagtagagctttagtatttctggcagcagacttttcagtgaaagctttacaggccaggagagagtggcatgacatacttaaagttctaagaaaaaaacttttaccccagaatagtatatccagtgaaaatatccttcaaacatgaaggagaaataaagattttctaaacaaaagctgaaggatttcatcaatactagatctgtcctacaagaaatgctaaggggaggttttcaatctgaaaaaaaaggacattaattggcaataataaatcttctgaaggtacagaactcaccggtaatagtaaatacacagaaaaacacagaatcttataacaacaattgtggtgtataaactactcatatgtttagtacaaagattaaaagaggaaccaatcaaaataatgactacaccaacttttcaagacatagataatacaataagatatagatagaaacaacagaaagttaaaaagtgataggacaaacttaaagtatggagtttttattagttttttctttgcttgtttgtttatgcaatcagtgttaagctgtcatcagtttaaagtcatggattataacaaattatttgcaagcctcatggtagcctcaaataaaaacacatacaatagatacacaaaaaataaaaagcaggaaattaaaagataccaccagagaaaatcactttaactaaaacgaagacaggaaggaagaaggaagagaagaccccaaaacaccagaatacaaattacaaaatggcaagagtaagtccttacttattaataataacattgaatttaaacagactaaactctcctatcagaagacatagagtggctgaatagatttaaaaaaaaaaaaagacctgggatctgttgcctacaagaaacacacttcacctacaaagacacacacagaccaaaaataaagggatgaaaaaaggtattctgtgcaaatggaaacaaaacaaaagcaggagtagctatatttatatcagacaaaatagatttcaagacaaaaactataaaaacagatgaaaatagtcattatgtaatgaaaatgggtcaattcagcaaaaggatataacaactataaatatatatacatccaacactggagcacccaggtatataaagcaaatgttattaaagctaaagtgagagatagacctcaatataatcatagctggtgacctatacacctcactttcagcattaagcacatcaaccagacagaagatcaacaaaggaacactgggctgaatgtgcactataggccaaatggacctaatagataattatagaacattttgtccaatggctgcagaatacacattattattattctcagcacaaaacaagtttaaaacataaaaaaatggaaataatcaagtatcttctctaatcacagtgtaataaaactaaaaattaataacaagaggaattttggaaactatacaaacacatggaaattaaataacatgtttctgaatgaccagtggatcaatgaattaagaattaagaaggaaattgaaaaatttcttgaagcaaatgataatggaaacgcaacatatcaaaacctatgggatatagcaaaagcactaccaagagggaagtctatagctataggagcctacataaaaacatagagaaacttcaaataaacaacctaatgatgcatcttaattaactagaaaagcaagagcaaatcaaaccccaaattaatagaaaaaaatagactaaaaataaatgaaactgaaataaaacaaaaaaagatcaagacaatgaaaagttggttctttgtaaagagaaatgaaattgactagcctttagccaaactaagaaaaaagagaagtctcaaataaataaaattagagatgaaaaagcacacattacaaccaatactgcagcagttcaaatgatcattagaggctaccatgggcaactacatgccaataaactggaaaacctagaagaaatggatacattcctagacacatacaaccaagattaaaccatgaagaaatccaaaacatgaagagaccaataataagtagcaaaattgaagctataataaaatgtctcccagcaaagaaaagtccagtactcaatggcttcactggaattttaccaaacatttaaagaatacctaataccaatcctactcaaaaaaatgttataaaatagaggaagggggaatagttccaaacttattctacaaggccagtattatta

SEQ ID NO: 3687 - DNA, 100 bp, Homo sapiens
  source 1..100: mol_type = other DNA
aaatctgccctactcaactcactgtattctctttcagatccaatgtgataatttatgtgaaatctttctgcaaactatacagtatgataaaaatataagg

SEQ ID NO: 3688 - DNA, 6147 bp, Homo sapiens
  source 1..6147: mol_type = other DNA
aagatggccaaataggaacagctctggtctacagctcctagcgtgatcgacgcaaaagatgggtgatttctgcatttccaactgaggtacctggttcatctcattggaactggttggacagtgggtgcagcccacagagggtgagctgaagcagggcagggcatcgcctcacctgggaagcacaagaggtcaggggatttccctttcctagctaagggaagccatgacagactgtacctggaaaattgggactctctcacccaaatactgtgcttttcaaatggtcttagcaaacagcacaccaggagattatatcctgtgcctggcttggtgggtcgcttgcccacggagccttgctcactgctagtgcagcagtctgagatccacctgcaaggtagcagcctggcagggggaggtgcgtccaccattgctgaggcttgagtaggtaaacaaagcagccaggaagctcaaactgggtggagcccactgcaggtcagcaagacctgctgctcctgtaaactccacctctaggggcagggcatagctgaacaaaaggcagcagaaacttctgtaggcttaaacgcgcctctctgacagctctgaagagagcagtgcttctcccagcacagtgtttgagctctgagaatggacagactgcctccttaagtgagtccctgacccctgtgtagcctaaatgggagacaccacctggtaagggccgactgacacctcatacaggtgggtgcccctctgggatgaagcttccagaggaaggatcaggcagaaatatttgctgctctgcaatatttgctcttctgcagcctgcgttggtgatacccaggcaaacagtgtttggagtcgatgtccagcaaactccaacagacctgcagctgagggaccttactgttagaaggaaaactaacaaacagaaaggaatagcatcaacatcaacaaaaaggacatccacaccaaaaccccatctctaggtcaccaacatcaaagaccaaaggtagataaaaccacaaagatggggagaaatcagagcagaaaagctgaaaattctaaaaaccacagcacctcttgtcctctaaaggattgcagcttctcaccagcaatggaacaaagctggatggagaatgactttgatgagctgacagaagtaggcttcagaacatgggtaataacaaacttctccgagctaaaggaagatgttcgaacccatcacaaggaagcaaaaaaccttgaaaagagattagatgaatgactaactagaataaacgcgtagagaagaccttaaatgacctgatggagctgaaatccatggcacaagaactacgtgatgcatgcaaaagcttcaatagctgattcaatcaagtggaagaaagggtatcagtgattgaagatcaaataaatgaaataaagtgggaagagaagtttagagaaaaaggagtaaaaggaaacaaacaaaacctccaagaaatatgggaatatgtgaaaagaccaaatctatgtttgattggtgtacatgaaagtgatggggagaatggaaccaagtaggaaaacactcttcaggatattatccaagagaacttccccaacctagcaagggaggccaacatttaaactcaggaaatacagagaacaccacaaagatacacctcgagaagagcaaccccaagacacataattgtcagattcaccaaggttgaaatgaaggaaaaaatgttaagggcagccagagagaaaggtctggttacccacaaaggaaagcccatcagattaacagtggatctcttggcagaaactctacaagccagaagagagtgggggccaatattcaacattcttaaagaaaataatttgcaacccagaatttcatatccagccaacctaagcttcataagtgaaggacaaataaaattctttacagacaagcaaatgctgagagattttgtcaccatcaggcctgccttacaagagctcctgaaggaagcactaaacatggaaaggaacaaccagtaccagccactgcaaaaacaggccaaattgtaaagactgtcgatgctaggaagaaatggcatcagctaacaggcaaaatagtcagctaacatcaaaatgacaggatcaaattcacacagaacaatattaaccttaaatgtaaatgggctaaatgctccaattaaaagatacagactggcaaattcgttaaagagtcaagacccatcagtgtgccgtattcaggagacccatctcacgtgcagagacacacataggctcaaaataaagggatggagggagatctacgaagcaaatcgaaagcaaaaaaaagcaggggttgcaattctagtctctgataaaacagactttaaaccaacaaagatcaaaagagacaaagaaggccattacataatggtaaagggatcaattcaacaacaagtgctaactatcctaaatatatatgcacccaatacaggagcacccagattcaaaaagcaagtccttagagacctacaaagaaacttagactcccacaagtaataatggaagactttaacaccccactgtcaatattagacagatcaatgagacagaaggttaacaaggatatccaggacttaaactcagctctgcaacaagcggacctaatagatatctacagaactctccaccccaaatcaacagaatatacattcttctcagcaccacatcacacttattccaaaattgaccacatacgtggaagtaaagcactcctcaacaaatgtaaaagaacagaaatcacaacaagctgtctctcagaccacagtgcaatcaaattagaactcaagattaaaaaactcactcaaaactgcaccactacatggaaactgaaaacctgctcctaaatgactactgggtaaataacaaaatgatggcagaattaaagatgttctttgaaaccaatgagaaaaaagacacaacgtaccagaatctctggaacaagtttaaagcatgtgtagagggaaattgatagccctaaatgcccacaagagaaagcaggaaatatctaaaattgacaccctaacatcacaattaaaagaactagagaagcaaaagcaaacatattccaaagctagccgaaggcaataaataattaagatcagagcagaactaaaacagaatagagacacaaaaagcccttcaaaaaatcaatgaatccaggagctgttttttttgaaaagatcaacaaattgatagactactagcaagactaataaagaagaaaagagagaagaatcaaatagacacaataaaaaatgataaagaggatatcaccattgatcccacaaaaaaaaaaactaccatcagagaatactataaacacctctacgcaaataaactagaaaatctagaagaaatggataaattcctggacacatacaccctcccaagactaacaggaagaacttgaatctctgaataaaccaataacaggctctgaaattgaggcaataattaatatcctacctaccaaaaaagtccaggaacagagggattcacagccgaattctaccagaggtacaaagaggagctggtaccattccttctgaaactgttccaatcaagaaaaagagggaatcctccctaactcattttatgtggccagcatcatcctgataccaaagcctggcagagacacaatgaaaaaagagaattttagaccaatatccctgatgaacatcgatgcaaaaatcctcaataaaatactggcaaaccaaatccagcaccacatcaaaaagcttatccaccatgaacaagtgggcttcatccctgggatgcaaggctggttcaacatatgcaaatcaataaatgtaatccagcataaacagaaccaaagacaaaaaccatatgattatctcagtagatgcagaaaaggcctttgacaaaattcaatagcccttcatgctaaaaactctcaataaattaggtattgatgggatgtatctcaaaataataagagctatttatgacaaacccacatccaatatcatactgaatgggcaaaaactggaagcattccctttgaaaactggcacaagacagggatgccctctctcaccactcctattcaacatagtgttggaagttctggccagggcaatcaggcaagggaaagcaataacgggtattcaattaggaaaagaggaagtcaaattgtccctgtttgcagatgacatgactgtatatttagaaaaccccatcatctcagcctaaaatctcctttaactgataagcaacttcagcaaagtctcaggatacaaaattgatgtgcaaaaatcagaagcattcctatacatcaataacagacaaacagagagccaaatcatgagtgaactcccgttcacagttgctacaaagagaattaaaatccctaggaatccaactaccggggatgtgaaaaacctcttcaaggaggactagaagccattgctcaatgaaataaaagaggacgtaaacaaatggaagaatgttccatgctcatggataggaagaatcaatattgtgaaaatggccataccgcccagggtaatttacagattcaatgccatccccatcaagctaccaatgactttcttcacagaattggaaaaaactactttaaagttcatatggaaccaagaaagagcccacatggccaagacaatcctaagccaaaagaacaaagctggaggcatcaaactacctgacttcaaactatactacaaggccacagtaaccaaaacagcatggtactggtagcaaaacagatatatagaccaaaggaaaagaacagaggcctcagaaatatcactacacatctgcaatcatctcatctgtgacatacctgacaaaaacaagaaattcggaaagggttccctatttaataaatggtgctgggaaaactggctcgccatatgtagaaagctgaaacgggatcctttccttacaccttatacaaaaattaattcaagatgaattaaagacttaaatgttagacctaagaccataaaaaccctagaagaaaacctaggcaataccattcagggcataggcatgggcgaggacttcatgactaaaacaccaaaagcaatggcaacaaaagccaaaatagacagatgtgatctaattaaactataagaaattctgcacaggaaaagaaactaccatcagagtgaacagacaacttacagaatgggagaaaatttttgcaatctacccatcttacaaagggctaatatccagaatctacaaagaactcaaacaaatttacaagaaaaagacaaacaaccccatccaaaagtggtcaaaggatatgaacagacacttctcaaaagaagacatttatgcagccaacagacacgtgaaaaaatgctcatcatcactggtcatcagagaaatgcaaatcaaaaccacaatgaaatatcatctcacaccagtcagaatggtgatcattaaaaagtcaggaaacaacagatgctggagaggatgtggaaaaataggaatgtttttacactgttggtgggggtgtaaactagttcaaccattgtggaagacagtgtggcaattcctcaaggatctagaactagaaataccatttgacccagccagcccattactggatatataccgaaaggagtataaatcatgctactataaagacacatgcacacatgtgtttattgtggcactattcacagtagcaaggacttggaaccagcgcacatgtccatcaatgatagactggattaagaaaatgtggcacatatacaccatggaatactatgcagccataaaaaaggatgagctcatgtcctttgcagggacatggatgaagctggaaaccatcattctgcacaaactgtcacaaggatagaaatccaaacactgcatgttctcactcataggtgggaattgaacaatgagaacacttggacactgggcagggaacatcacacaccggggcctgtcgtgggatggggggcaggggaagggataatattagaaggaatgcctaatgtaaatgacatgttagtgggtgcagcaaaccagcatggcacatgtatacctatgtaacaaacctgcactttgtgcaggtgtaccctagaacttaaagtataagaaaaaaaa

SEQ ID NO: 3689 - DNA, 38 bp, Homo sapiens
  source 1..38: mol_type = other DNA
aatgtttgtccctcaactaagattccggaacactgctg

SEQ ID NO: 3690 - DNA, 159 bp, Homo sapiens
  source 1..159: mol_type = other DNA
agggctggctttcttagcgtgtaacttgtgtagcagcacagggcccacacttagaaggaccccacacttggttcaaggctctgctatagcggaaattcttaataatgtttgaagaagggccccatgatttcattttgtgctgagccctcaaaattatgt

SEQ ID NO: 3691 - DNA, 297 bp, Homo sapiens
  source 1..297: mol_type = other DNA
gtcaggcatggtggctcaggcctgtaatcccagcattttgggaggctgaggcaagtggataacttgaggtcatgagttcgaaaccagcctggccaaaacagtgaaaccccgtctctactaaaaatacaaaattagccagatgtggtggcgcacacctgtaatcccagctactcaggaagctgaggcaggaaaatcgcttgaacctgggaggtggaagttgcagtgagccgagatcgcaccactgcactccagcctgggtgacaagagcgaaactccatctcaaaaaaaaaaaaaaaa

SEQ ID NO: 3692 - DNA, 133 bp, Homo sapiens
  source 1..133: mol_type = other DNA
ggactttggggggtccacatactctggaactgtgtaatgtgaatatgtatgttttgttctattttcctaggagatgatccacagcttttatcagattctcaaagggcttataaccaaaaaaggctaggaccca

SEQ ID NO: 3693 - DNA, 311 bp, Homo sapiens
  source 1..311: mol_type = other DNA
gctgggtgcagtggctcacacctgtaatcccagcactttgggaggccaaggcgagcggatcatgaggtcagaagatctagaacagcctggtcaacatggtgaaaccccgtctctactaaaaatacaaaaattagccaggcttagtggcgggcatctgtagtcccagctactcaggaggctgaggcaggagaatcacttgaaccctggaggtggaggttgcagtgagccgagatcatgccactgcactgcactccagcctgggtgacaaagcaagactgtgtctcaaaataaataaataaaataaaataaaa

SEQ ID NO: 3694 - DNA, 105 bp, Homo sapiens
  source 1..105: mol_type = other DNA
tccaaacccatataggagtctgatctcagaaacacagtatactgataatttccaggcttgcctggtgcaggaaacttcagctctacctagaagataaaatcagca

SEQ ID NO: 3695 - DNA, 221 bp, Homo sapiens
  source 1..221: mol_type = other DNA
agtgagccaccttggaagtagatcctgcagtcccagtcaagccttcggatgactgaaacttcggccaattatctgactgccatcagagaacccaagccagaactacccagctaagctacttctaaattcctgacccacagaaactatgtgaattaataaatgtttcttcttattttaaatcactaagctttgcaggtattttgttatgcagcaatagataa

SEQ ID NO: 3696 - DNA, 400 bp, Homo sapiens
  source 1..400: mol_type = other DNA
gcagcactattcttaccaggcaaaagtgaaaacaactcaaatgctgatcaactgataaatggattaacaaaatgtggtatctccatacatactgatagatactacaacatgtataaaacttgaaagtattatgctaagtaaaagaagccagacacaaaagactatatattgtatggtttcacttacataatatacagtatctagacaaggcccatgtattattagtggttacttggggtttgaggtggaaataggcataactgtaaatggacacaagggatcctgtggactgatggaaacattctaaaactggattgtggagacgtttgcacaactttgtaaatcattgaattatacgcttaaaatgactgaattttatgttatataaattaaacttcaa

SEQ ID NO: 3697 - DNA, 872 bp, Homo sapiens
  source 1..872: mol_type = other DNA
ttgtaggacagatactctgggacattggtctgggaaaaaattttatggctaagacttcaaaagcacaggcaaccaaagcatatagacaaaagggactgtgtaaaagcttctgcacagcaaaggaaacaatcaacagagtaaagagacagcctacagaatgagagaaaatatttgcaaactattcatgaaatgagactaatctccagaatatgtaaggaactcaacaggaaaaaaaatagtttcgtatctgaatagacacctctcaaaaaagaagacatacaaatggccggcaggtatattttttaaatgttcaacatcactaatcatcagggagatgcaaatcaaaaccacagtaagcaatcatcttaccccagttagaatggctgttacggaaaagacaccaacaaatgctggtgaggatgcaaggaaaaggaaactcttatacactgttggtgggaatgtaaattagtacagccattatgcaaaacagtatggaggtttctcaaaaaccaaaaactagaactaccatatgatacagcaatcccactgctgggtatttatccaaaggaaaggaaatcaattcaatatatcaaagatagataacctacacccccatgtttattgcagcactgtttataatagccaagatgcggaatcaaccttaagtgcacatcagtggatgaatggataaagaaaatgtggtatatatacacaatggaattatattctaccatattttttatgaaaatgaaattctgtcatttgcagccacatggatagaattgagatcattatgttaaatgaaataagccaggcctagaaagacaaatatcacatgttcttactgatgtgggaactaaaaaaagttcgtc

SEQ ID NO: 3698 - DNA, 1043 bp, Homo sapiens
  source 1..1043: mol_type = other DNA
cttatttcaggggtgcaaggattgttcattatatacaaatcaataaatgtgatacatcacatcaacagaatgaaggacaaaaaccatatgatcatctcagctaacacagaaaagttatttgataaaattcaatgtcccttcatggtaaaaactcttgataagttaatcatagaaggatcatacctcaaataatgaacatcatgtctgaaaaacccacatttaacatcttactgaatggggaaaagctgaaaacctgccctctaagaactagaagaagacaggatgcccatttttaccactcctgttcaacatagtactgaaaattctagccatagcaatcaggtaataaaagacaccaaattgggaaaaaggaggtcaaattgtccctttttcacaggtgacatgatatatatggcaaaacctgaagactccaacaaaaaactcttagaactgataaatttagtaaagttgcagatttttttttaaaacccacaaaaaactaatagcatttctgtgcaccaataacaactagctgaaaaagaaaacaagaacacaatcccatttattaaggctaccaaaaagaatagtaataaatttaaccaaggaagtaaaggttgtataggaggaaaactagaaattactgataaaattaactgaagtagacagtggaaatagacaaatgggagacatcccatgttcatggatcagaaacattaatattgttaaaatggccatattttccaataaaatctaaagattcattgcagttcatatcaaaataccaatgacattcttcatggaaatagaaaaaaaaattctaaacttcatgtggaactacaaaagagcctaaatagccaaagcaatcctgagcaaaaagaacagttggagacatcatattacctgaggtcaaaacgatactacaaagctttagtaaccaaatcagcatgatgttggtataaaaatggacacacaggctgagcaaaataatactacaaagctttagtaaccaaatcagcatggtgttggtataaaaacagacacat

SEQ ID NO: 3699 - DNA, 322 bp, Homo sapiens
  source 1..322: mol_type = other DNA
aaatatttttaaagtctctgtctagaaggagatttttaaaaacaagcataaaaggcttaaactacaaaagaaaaagctatgactttaaattaaaatggccacaaataccacaaattaaaagacaaagacctgaaagagatgtttccaatacacttaaccacaaatgatcagtatccagaatatataaagaactcctacaaatcagtaagaaagatagcaacccaaaagaaaaatggtgaaagaatatgatggggccatttccacagaaaaggaagaaaaggaaagtagaacgactgataatatatcaaatgataatcaacct

SEQ ID NO: 3700 - DNA, 2410 bp, Homo sapiens
  source 1..2410: mol_type = other DNA
tagatgcaaaaaatctcaacaaaataccagcaaaccaaatccatcagcacatctaaaacctaattcaccataatcaagtagactttattcctgggatgcaaggttggttcaacatatgcaaatcaatcactgtgattcaccacataaacagaattaaaaagaaacacgatatgaccatctcaatagatgcagaaaaagcttttgataaaatccaacatcccttcatgataaaacccctcaataaactaggtatcaaaggaatatatctaagagccatttatgacacacccacagccaacatcatactggatgggcaaagcctagaaacattctccttgagaaatggaagaagacaatgatgctcactttcaccactcttactcaacatagtaatggaagtcctagctagagtaatcaggcaagaaaaagaaataaaaggtatccagataggaaaagaagaagtcaaactatctttctttgctaatggtatgattctataccagaaaactccgaagactccaccaaaaggctccttgaactgataaacaacttcagtcaagttttaggatacaaaaatcaatgtacaaaaatcagtagcatttctacgtaacaataaccttcaggctaagagccaaatcaagaacacaattccatttacaagagccacaaaaacaagaaaatacctaggaatacatctaatgaaagtagtgaaagatctctacaaggagaactacaaaacactgcttaaagaatcagaaatgacacacacaaatgaaaacatatttcatgctcatggattggaagaatcagtatcattaaaatgaccatactgcccaaagtaatttgcagattcagcattattcctatcaaattaccaatatcatttttcacagaatcagaaaaaactactctaaaattcatatggaaccaaaaaacagcccaaacagccaaagcaatcctaagcaaaaagaaaaaacctggaggcatcacattactcaacttcaaactacactacaaagctacagtaaccaaaacagcacagtactggtacaaaaagagatacatggaccaataaaacagaatagacaacccagaaataaagccacacacctacaaccatctgatgttcaacaaagttgacaaaaataagcaatgaggaaaaagtccctattcaatacatggtgctgggataactggctagccatatgcagaagaatgaaactggactcttacctatcaccatatacaaaaattaactcaagatggattaaagacataactgtaagacctaaaactacaaaaatcctagaagaaaacctaggaaattcttttctcgacaacagccctgtcgaagaatttatggctaagtcctcaaaaacaattgcaacaaaaccaaaaactgacaagtaggacctaagagcttctatacagcaagagaaaccattaacagagtaaacagataatctacagaatgggagaaaaaattcagaaactatgtatctgacaaaggcctaatatccagaatttataaggaacttaaatcaacaagtaaaaaacaaataaccccattaaaatgtaagcaaaggacatgaacagacacttctcaaaagaagacatacaaatggccaaaaaaaaattgaaaaaatgctcatcactaatcatcagagaaatgcaaatcaaaatcacaattgaaataccatctcataccagtcagaatagcttttgttaaaaagtcaataaataacagatctcagtggggctgtggagaaaagggaaaacctttacgctgttggtgggaatgtaacttagttcagccactgtggagagcagcttggagatttctaaaagaacacaaaatggaactaccatttaacctagcaatcccattactgggtatatacccaaagaaaaatatatcattctaccaaaaagacacatgcacccatgtgttcatcacagcactattcacaacagcaaagacatggaatcaacacaggtgtccatcaacagtaaatgagataaagaaaatgtggtacatatacaccatggaacactacacagccacagaaagaacaaaatcatgtcctttgcaacaacacggatgcagttgggggccattatcctaagcaaactaatggagaaacagaaaaccaaataccccatgttctcacttacaagtggcagccaaaccatgagtacatatggacattaagatgggaacaaacagacactggagaatacaagatgggagagggaggcaaggatggaaaaactacctattgagtactatgctcacttcctaggtgacgggttcagtcgtacttcaaacctcagcattatgcaatatacctttgtaataaacctgcacaggtacacccggaatctaaaataaaagcggaaaaagaaaaaa

SEQ ID NO: 3701 - DNA, 193 bp, Homo sapiens
  source 1..193: mol_type = other DNA
ctcccttcactggcgacccggcagcggcagcagcagcggcggcggctccctccgcagcggcggcggcgccccctccccttctcggcacggccccctcccctcacacagaggcacctcgaggagcggcgggcggggcggtgtaggcgctgctgccgccgcctcctcaggagcacccggcaaggggccgcaggag

SEQ ID NO: 3702 - DNA, 318 bp, Homo sapiens
  source 1..318: mol_type = other DNA
aatcagatgacctcgtgtgagatttggaggagagaaggaaatggagagcatgcgtctgccgcttctgtggtttctgtcggtaagcacagtgatgaggtgctgagttttccccagaaggcctcccagtgtcctattaccagcttcacaagcgtcgagggcagggcatgggcatctattgttcaccagtggagatctatctggcacagaaccgatccaaccattgcagtggtcacagcggtgttggctttctgattctcaaccttcctgaccgccagaggagacagcctctttggtggccctgttctgtggtattgtgct

SEQ ID NO: 3703 - DNA, 138 bp, Homo sapiens
  source 1..138: mol_type = other DNA
tctcctaccaccagtgttaatcttgagttagtcacatttaaccagcctcaactgcaaattcttcgtctataaaggggtgtgtcactcaccttcctcagagtagtgttttgagaattgactaatatctaaagcatgaaa

SEQ ID NO: 3704 - DNA, 82 bp, Homo sapiens
  source 1..82: mol_type = other DNA
ttaaatcagctactttacctctctaggcctcagttttgctatctacaaaatggagataataatgacccctatttcacaggat

SEQ ID NO: 3705 - DNA, 435 bp, Homo sapiens
  source 1..435: mol_type = other DNA
tggcagtgtttgacaaagctgttcaataaaaatacatttattctgtatcttttttctgagcacatggctaaactacatttcccaggctcccttgcaattaaatgtggccatataactagccctcaagtaaagaatgtgagaggaagtgatggtggcacttccaggctaaggtattttaaaagtgggtgtgccccgtctactctctgttgccccttctgtaaactgaaacaggttacgatgataagctatgggatggtggagctacaagataggggtgtgggacccagagtcactgcatggaggaaagccacctaccgaccagaaacatgaatttttgactattaaatgagcaagaataaacgtctattgcttttgagccattatatatttgcaggcctatttgttacacctgctaacattagcctaattgataca

SEQ ID NO: 3706 - DNA, 2932 bp, Homo sapiens
  source 1..2932: mol_type = other DNA
gaaggtcattaatgataaagagtcaatccagcaacaggatataatgattgtaaatatatatatgcatctgacacaggatgacacagatatatgaagcaaatattaatacaactaaagagagagatagaaatcattagctggagacttcaacacctcactttgagcattggacagatctcccagacagaaactcaacaaagaagcattagacttaatctgcactatacaacaaatggatctcatagatatttacagaacgtttcatccaaaagttacagaatacacattcttcccctcggcacatgggtcatttgcaaagatagaccatatgttaagtcacaaaacaggtcttaaaacatttttagaaattgaaattatatcaaacatcttctttttctcacacacaatggaataaaactagaaatcaacaacaagaggaattttggaaactacacgaacacatgcaaattaaattatatgctcctgaatgaccaatgggtcaataaaggaattagaagacaattgaaaaatttattgaagcaaatgataatggaaacacaacataccaaaacctatgggatatagataaagcagtactaagagggaaatttatacctataagtgcctatatcaaaaaagaagaaaaacttcaaataaataacctgacaatgcatctcaaagatctagaaaagggagagcaaaccaaacccaaaattaatataagcagagaaataatcaagattagggcagaaataaatgaattcaaaatgaagcaaataaaaagatcaacaaaacaaagagttggtttttgaaaagagaaacaaaattgataagcttttggccagactaagaaaaaaatggagaagacccaagtgaataaaatgagacaggaaaaatgagacattacagctgatatcacagaaattcaaaagatctttagtggctactatgaaaaaccatatgccaataaattggaaaatctggaggaaatggataaattcctagacacatacaacctaccaagattgaaccacgaagaaatccaaaacctgaatagaccaataacaagtgaagaatcaaacccataataaaaattctcccagtaaaggaaaacctggaaccctatggattcactgctaaattctgccaaacatttaaagaactaataccaatcctactgaaactattctgaaaaatagaggaagaaatacttccaaattcatcagcatgaccttgatacccaaactagacaaagacacatcaaaaaaagaaaactacagaatgatatctctgatgaatactgatgcaggaatcctcaacaaaatattttacctgcaaacctaattcaacaaacattaaaaaattgttcatcatgaccaagtagtatttataccagggatgcagggatggttcaacatatgcaaatcaatccaagtgatacaacatatcagcagaatgaaggacaaaaaaccatatgatcatttcaattgatgctggaaaaacatttgataaaattcaacatctcttaataataaaaaccctaaaaaatctggatatagaaggaacataccttgacataatgaaagccatatatgaaagacccacagctagtgccatacttaatagggaaaaattgaaagcctttcctctaagatctggaacatgacaaagatactcattttcaccactgttcttcagcatagcactggaagtcctaggtagagcaatcagataagagaaagaaataaaggacaaccaaactggaaataaagaagacaaattatcctcgtctgacatgatcttatatttggaaaaacctgaagactccacaaaagaaaattaggactgataaatttagtaaagtttcaggatacaaaatcaacatacaaaaatcagtagcatttctatatgctaatggtgaacaatctgaaaaagaaattttttaaaattccatttacagtagccacaaataaaattaaataggaattaactttatgaaagaaatgaaagatccatacaatgaaaactacaaaacactgatgaaagaaattgaagagggcacaaaatggaaagacattccatgttcatggattgggagaatcagtattgtttaaatgtccatgctacacaaagcaattacagattcaatgtaatcctatcaaaatagcaatgacattcttcacagaaatagaaaaaaaatctaaaatttatatggaaccagaaaagacctagaatagcccaagatatccttagcaaaaagaactaaactggagggatcacattacctgatttcaaattatactacagagctatagtaaccaaagcagcgtgctactgtcataaaaacagacacataggccaatggaacagaatagagaacccagaaacaaattcacataccactcatttttgacaaagttggcaagagtatacactggggaaaagacagtcttttcaataaatggtgctgggaaaacaggatacctatatgcagaagaatgaaacttgacccctatctctcaccatacacaaaaatcaaatcaaaatctaaggactcaaactatgaaaacactacaaggaaacattggggaaactctccagcacattggtctgggcaaaagtttcttgagtaataccccacagacacaggcatccaaggcaaaatgagcaaatgggattacgtcaagttaaaagcttccacacagcaaaggaagcaagcaacaaagtgaatagataacccacagaatgggagaaaatatttgcagactacccatctgacaagggattaataaccagagtgtataagtaactcaaacaactctataggaacaagtctaataatctgatttaaaaatgggcaaaatatttgaatagacatttctgaaaagaagtcgtatacatggcaagcaagcaagcatatgaaaaggtgctc

SEQ ID NO: 3707 - DNA, 264 bp, Homo sapiens
  source 1..264: mol_type = other DNA
ggccagcacggtagctcacccttgtaatcccagcactttgggaggctgaggtgggtagattacttgagcccaggaattcaagaccagcctgggcaacatggtgaaaccctgtttctataaaaaataatctgggctttgtagcatatgcctgtggtcccagctactgaggaggctgaggtgggaggattgcttgagcccaggaggcagaggttgcagtgagccaaggtcacgtcactgcactctagcctgggcaacagagtaaga

SEQ ID NO: 3708 - DNA, 294 bp, Homo sapiens
  source 1..294: mol_type = other DNA
gccgggtgtggtggctcacgcctgtaatcctagcactttgggaggccgaggtgggtggatcacaaggtcaggagttcgagaccagcctggccaatatggtgaaaccccgtctcttctaaaaaaatacaaaaattagccgggtatggtggcgcatgcctgtagtcccagctactggggaggctgaggcaagagaattgcttgaactcgggaggcggaggtcgcagtgagccgagatcgtgccactgcactccagcctgggtgacagagtgagactttgtctcaaagaaaaaaaaa

SEQ ID NO: 3709 - DNA, 1410 bp, Homo sapiens
  source 1..1410: mol_type = other DNA
attcaaccatggcacattgccctactgcaaacttggcagcctcagtggggcctccataccactttagccatcctattatgtttgtctagaatattcactttccttttgtacccagagacttactcctcctctagtatccccaggtctcctcctttccattttcaatttcctactcccatccccactatatgatttggccttaggagcctaatatagaaaacagcagccctcagacaggaatgcccccaacttcccaccgtctaatctaccttttatctgggttgctcctcctgttacaatagaagaaatgtccctctgctttttaaagattagcatgtgtcctgttctcccacctactcagaatcccacatcctctcctctctcttatggatctcagttttcatttattactagatccttcctctactcagtcaagcatactgaagcacctcccatgttagaaaacactcctttgactttatgttttcctctggctactagtagtttcacctctcatcatggaacttctcaagttgctcactgctttactgaaactgctcttgtaaggtccacaccctccatgttgctacttgaaagatttcctcttacttagcatcccaagaatatttacccaattgaacagtccttcttatttaaggccctcttctcttggcttctgtttcactgtgccttcctgtttttccttctctctcccttgctactcctccacctctccccaacctctacctgttacatccctgtgggttgctatctaggccttcgctttgggactccctcttttgaggattttcatcacacacttggcttcaactatcatctaccagctgatacaacccaagtttatatttccaacaggatttccttctaagcaccagacccctacttgatatccctagtctgtgttgtgaggacctcggattcaagatggccaaaactaaactcatcattcacctcccagacctgatccaccttctgtgtctccttcctccgtaaatggcctgacatccactctttcactcagaatgaaaaaagtaattctgaacacctcattgtctaccacctctcacatccagtcagtctctaaatcctgctgatcatagctcttaattatttctgggatgtgttcacttttttctaattccagtgactccttcctaggctatccaataagatagctatcctaggctatctcttgcctgagccatcacaacagcctcctatcatcttcctacatccacgtgggcaactgcaatcaagtctctgccctgtagccatggtaatgggataaaagcaaaaacatagtcatatcatttcctctttaatacacttcagtaacttacaacacatgaagtccttgatgtggcctattaggccctgcctgcttccctg

SEQ ID NO: 3710 - DNA, 448 bp, Homo sapiens
  source 1..448: mol_type = other DNA
tgtgcaccagcatctcgaattacttctggctgcccaggatgtaccatattctcttctctttttgtgtctatgcactgttccctgaccgagaaagccacttctatgccttccctcttcctctcagaacttcacacggttaacagctatttcctacttggcctttcagtctcagcttagatgttactttttttgagtctccttctctaaatacccaagtctggattacataccacccaccatttgttttcataagactctatacttagccccataatattcttatcactttgaattaactgttcatttccttttctgtctaaaccacaagtcaataaacgcttagagtgcgggacttttatctgtcacacagctaataccaatggctagcactgtgctggcacaggctgggtacaatactaaaaatcataattcaatgttgaatgaatga

SEQ ID NO: 3711 - DNA, 318 bp, Homo sapiens
  source 1..318: mol_type = other DNA
ggccaggcgcagtagctcaagcctgtaatcccaacagtttgggaggctgaggcgggcagatcccctgaggtcaggagttcaagatcaacctgactaacatggagaaaccccgtctctactaaaaatacaaaattagccggatgtggtggcgcatgcctctaatcccagctactcaggaggctgaagcaggagaattgcttgaacctgggaggcggaggttgcagtgagccgagattgcaccattgcactccagcctgggcaacaagagtgaaactctgtctcaaaacaaacgaacaaaagcaaaaaaaaaaaaaaaaa

SEQ ID NO: 3712 - DNA, 212 bp, Homo sapiens
  source 1..212: mol_type = other DNA
gagagaagcgaagtgaagagaagcaaaagcaaagcgagtaaaaaagactcaggcttgagctctagtgtcaccacttactgatgtgtggccttgggcaagctacttaatttctaatccttggtttttccttgtctgggaatttaaaatggcacctattttagtactgtaaggagaagagaaaataccaaaaagcaaagtaatcagtacattgc

SEQ ID NO: 3713 - DNA, 127 bp, Homo sapiens
  source 1..127: mol_type = other DNA
agggctcacaacagtgttcacgaaagagtcactttcaaatacccaccaagcccagcgtgggtgacccattccaccagaggtccagttcagtacatgccttactgccggcctccacccctctcttgcc

SEQ ID NO: 3714 - DNA, 329 bp, Homo sapiens
  source 1..329: mol_type = other DNA
taatgggatgttagatggggagttgtgactgatgcatcaagaaatgacagataccaaaatcacttacgaaatttcaaagtaaatagctgaggactgcttagatgctcaatcacacaggctacaaaagactcaagtgactgcagatggaagagggctttagaggatttatttggacagggctgtgctgagagtcccaccctcaccccacaatgggcgggggcactggcatcgaacaccaagctgagtgagaagggctcctccaggcctcgcagggagcttgctggcttctcctggctcacagcagactgggcccgactcccatcggagga

SEQ ID NO: 3715 - DNA, 133 bp, Homo sapiens
  source 1..133: mol_type = other DNA
cttctctgtaaaatggaaatgacaccactagccatctcaatagttacaagaattaaaagagatacagtacctgaagtgcttagcgcatggtagcatttcataaatgtttagtgtcaatactaatgctctaata

SEQ ID NO: 3716 - DNA, 432 bp, Homo sapiens
  source 1..432: mol_type = other DNA
ctcattttattctagccacaccattcccattgatgtctataaaaattccaggtattggagctgtatcttggctgttccctccatgtgaaaagctctgtcctccagatatctccaggtatttccttcaaaccatggcagaaatctcccttttcaacaagtcttactctgatgttcctatttaatacagcatcaggacaaccctcaccccacctatatcctttaccctattttatgtttttcccccaaacattttacctttcaaagtcctatataatttattacttacatttattgtctatcccattcttcctccaaatcctctcctcccgctggaatgcaagctccaagaaagcagggaactttgatttgttcactgatgtatcttaagaatcttcagcacatagccggcattcaataaatatttttgaatga

SEQ ID NO: 3717 - DNA, 353 bp, Homo sapiens
  source 1..353: mol_type = other DNA
agttgaactcgtggaagcagagagtggaatggcggttactggaggctgtgcgggggacggactgggaaaggagagacgctggtcaaagggtacaaagtgtcactgagaccggaggaacaggttctggtgatctgttgcacagcatggtgactatagttaatgataatgtattgtctgtttcaaaattgctaaaacagtaggttttaaatgttgtcatcacaaaaagattacaagtaggggagatgatagatatgtcagttagcttgatgtaatcattccacaatgcaaacatatatcaaaacatcacattgtgcctcataaatatatactctcctcttttgtcaattaaaaat

SEQ ID NO: 3718 - DNA, 297 bp, Homo sapiens
  source 1..297: mol_type = other DNA
ggccgggcgcagtggctcatgcctgtaatcccagcactctgggaggccgaggcagacggatcatgagatcaggagttcgagaccagcctggccaacatgatgaaaccccgcctctactaacaacacaaaaattagccaggtgtggtggcgggcgcctgtaatcccagctattcaagaggctgaggcaggagaatcgctggaaccggggaggtggaggctgcagtgagccaagattgcactccaacttgggcaacagggagagactcagtctcaagaaaaaaacaaacaaacaaaaaa

SEQ ID NO: 3719 - DNA, 309 bp, Homo sapiens
  source 1..309: mol_type = other DNA
ggcccggcgcggtgcctcatgcctgtaatcccagcactttcggaggccaagaagggtggcttgagatgagatcaggagctcaagacaagcctggccaacatggtgaaaccccatctctactaaaaataccaaaattagccaggtgtgttggcacacgcccgtcatctcagctactcaggaggctgaggcaggagaatctcttgaacttgggaggcggaggttgcagtgagctaagatcacaccactgcactccagccagggcaacagtgagactcagtctcaaaaataaacaataaaataaataaataa

SEQ ID NO: 3720 - DNA, 313 bp, Homo sapiens
  source 1..313: mol_type = other DNA
gtcaaacattattctaggtgtttctgtgagggtgttttatatgagattgacatttaaatcaatcagtgaactctgagtaatgcagactgtcctcctcgatgttagtgggcttgatccagtcaggtgaaggtctgaagagaaaaaaagaccgtcctcttcccagaacaagagaatcctccaacagatacctttggactggaccttgcaccatcagctttcctgggtttccagcctcctgcctcacactccagcttttggacttgttagacttaataataacaacacaagccaatccttttaaggaagtttgtct

SEQ ID NO: 3721 - DNA, 267 bp, Homo sapiens
  source 1..267: mol_type = other DNA
cagcggtacaccagctctggcccagggcaagacagggaatttcccaatcactgagtaggctgtagccactctctccattaggcctgacttcaccatggggaaggggagaccctttcaagggtattctttcctggggtactctcagtcctaggacatcatagctctctttcatccctcttaaaagttaataccattatcagttaacagtttttatattaaaattatccctgttcaagttaatggtatggtttctgtatcctgactgga

SEQ ID NO: 3722 - DNA, 83 bp, Homo sapiens
  source 1..83: mol_type = other DNA
agatggtcaccaacttatgttttaggattttttgactttatgatgggtttatagggatgcagccccatttcaagctgaggagc

SEQ ID NO: 3723 - DNA, 71 bp, Homo sapiens
  source 1..71: mol_type = other DNA
cagtctcctaattaatgacagcttgacttaacaattttccaactttaccatggtgtgaaagaggtatgatt

SEQ ID NO: 3724 - DNA, 59 bp, Homo sapiens
  source 1..59: mol_type = other DNA
tttttaacttatgatgggtttattgggaattaaccacaatgtaaatcgaggaccatctg

SEQ ID NO: 3725 - DNA, 821 bp, Homo sapiens
  source 1..821: mol_type = other DNA
ctttctctccccttatataagccactacaggaactcctcctgactaaggtcaccccctcatccatactccaatacctgaaagactctatatttccctcttttattcctgtaacccacttctctttaattgctgataggccttcagcagcagcagtaatcactgtacatccaccctcttttctggatactccttttactttctcgatctaagaaacctgacttttccattaagtcattactttcctggcagctcttggaagtgatagtttttcacccgtttctaccactacccaagaggcagaaaagaggcaatgaggagtgagaagaattacttattccacctattgaacagtggtagaaaggggtgaaaaactgtcatttgcaagagctcccttaaaatctccaaatttgagccccacatcatcagattagatcaccctgtaccactcattattgccatcattttcttactcctgtgtcactcaccctaattttcaccaatcttcactccaggcatactgtcgctctcacaaccttcctcctctttctaatcacttcagagatccctcctagagtttcttgaccttctctttcctagtgatcttgtcctccacactatactagacattcactcccatgtcatatctccttagactgaggcatgaattcagtctacaacactgagattcttctcagtgttgcccaagtctttgactccactgcacgccctgctcccaggcttccaaggatcctttggctgcacaaaggacctaaaattcatgaacttactgttctttagtcccttaatgtcctatcattcc

SEQ ID NO: 3726 - DNA, 1635 bp, Homo sapiens
  source 1..1635: mol_type = other DNA
agaaaatcaccttcactaaaaggaaaacaagaaggaaagaagaaaggaagagaagaccacaaaacaaccagaaaacaattaacaaaatggtaggattaagttcttacttaatcaataacaacactgatagtaagtggactaaattttccaatcaaaagatctacatggctgaatggataaaaaacaagacctaatgatctgttgtatacaagaaacacacttcacatatgaagacacaaatagactgaaaatgaaggtatggaaaaatattccatgcaaacaaaaaccaaaaaagaacaagagcaattatacttatattagaaaaaatcaatttcaagacaagaactgtgaaaagagacaaggtcattgtgtaatgataaaagggtcaattcagcaagagaatataacaactgtaaatatatattcactcaaccctggagcatccagatatataaagcaaatattattaaagctaaagagagagatagaccccaacataataatagctaaagacttcagcaccccactttcagcattggacagatcatccagacagaaaatcaacaaaaaaaattggatttaacctgcaccatagaccaaatggacctaatagatatttatagaacatttcaattcatggctacagaataaacattcttttcctcagcacttggctcattctcaaggataggcaatatattaggccacaaatcaagtgtttaaaaattcaaaatatattgaaaaaatattgcatatcttctctgaccacaatggaataaaactagaaataaataacaagaggaactttggaaactatacaaacacctggaatatgctcctcaatgaccagtgagtcaatgaagaaattagcaaagaaattaaaaaatttaatgaaacaaatgaaaatggaaacacaacataccaaaacctatgggatacagtgaaagcaatattaagaggaaggtttatagcaataagtgcatatataaaaacacagaaaaacttcaaataaataacctaatgattcattttaaagaactagaaaagcaagagcaaaccaaacccaaaattggcagaagaaaataataaagatcagagcagaaataaatgaaattgaaacaaaaactatacaaaagatcagcgcaacagaaattggttttttgaaaagagaaacaaaatcaaaaaacaaattttagccagattaactaagaaaaaaagagaagactcaaataaaatcagagatgaaaaaggagacgttgcaactgattactgcaaaaattcaaaggattattagagactactatgagcacctatatgccaaaaaaattggaaaacctagaagaaatggataagttcctagacacatacaacctaccaagattgaaccatgaagaaatccaaaacatgaatagaccagtaacaagtaatgagattgaagctgtaataaaaagtctcacagcaaagaaaaccttggaatctgatggcttcactgctgaattctaccaaacatttaaagaagaactaataccaatcctactcaaactattctgaaaaatagaggagaagggactacttccaaattcattctatgaggccagtataccaaaaccagataccaaaaccagacaaagacac

SEQ ID NO: 3727 - DNA, 581 bp, Homo sapiens
  source 1..581: mol_type = other DNA
gaagcaagataggtagtcaaagaagtgaccgtgtcctcaagacacagcaaccttggtgaccatactatcaacaaaaatgagtctcagcattcacattgtaattgagctcattccagcaaagctatcgtcagttgagaatttcccccatagagggcatgtgccctttgattttacctgtcttcaaactgacgctttgctcattttcatagtaaaaaacatagcccgggtagagatataagatgctaatgagacctgagatgtacgaacaagcatgtacagctgctgtgtgtgtgcgcccagaggaccacctagaacatgcttaccagtaacaccttttcccacctccttatgaataattatgtagggatcccataaagggagcctccctagtgtcagtctctgctgtctcatcctgaatccaatctctctcagggtatactgccattctgcccctaactttctacatattctttttcttttgcaataaattactctgctataccttctttgcagtgtgtctcttgtttaaattattttaaactaagaagacaggaactgaggtatcccaacagccgtcaaca

SEQ ID NO: 3728 - DNA, 1772 bp, Homo sapiens
  source 1..1772: mol_type = other DNA
agtaaaactattgaaaaaaggatgctaacactatgctaatgggaacattaatccaaagaaaactgggatggctataatgatatctgacaaagtagatttgagaacaaagtaattaacagaaataaagaagatcatttcataatgataaaggggtcaattcaagaggttataacaattataaacacttatgtgcctaataacagagcttcaaaacatgtaatgcaaaaactgatagaactacaaggacaaatagccaggccacaagcatgttagagatttcaatacctctttattaataatgaaaagaacaagttgacagaaaaattgtcagagatatagaagaggacctgaacaacactgttaatgaacctgacctaattagcatttatagaacactccacataacaatagcagtatacacattcttttcaagtgcacacagagcatttactaagatagatcatataattagccataaaagaagtctcaatacgttgaaaataagaatacttatacagtaaatgttctctcatctaatgaaattaaattagatatcagtaacaaaaaaaattctagaaaatccagatctttgaaaatcaaacaacacacttctaaaaaacctcataaatcaaaaaagaattcaaaggagaaattcaaaagtgttttcaacagaattaaaatgaaaatgcagcagataacaatttatgacatgacactaaagtagtacttgggaaagttagggcactaaattatatcagaaaagaagagaagtcttaaatcaatgacttcactttccaactcaggaaacaaacgatttcttaaaaagcaaattaatttcaaagtaagtagaagagaggaaataataaagaaattaataaaatatatacttgaaaaacaatagagaatatttatctttgagaaaaattaataaaattaataaatcttagccatactgaccaggaaaaaaagacagaagacacaaattgccaatagaaaaaatgagagatgtgatatcattacagattctacagatattaaaagataataaaggactattgtgaacaattttatgccaataaatttgacaacttagatgaaatgggcacattccttgagagatgtaaattaccaaagctcactcaaaaagagatagatgacttaaatagtcctgtatgtattaaaaacattgaattcgtagctataaaatttcccacatagaaaacttcaagcacagatggtttcactgatgagtcataccaattatttacaaaaaaaattattccagttctacccaaattcttccagacaattaaagaagagagtacttcgtatgtcacactgtgaagctagcattaccttataataaatgataaaggataataaaaccagacaaagacattataagaaaactacagactaatatcatcatgagaatagttacagaaattcttaacaaatttttagtaaattgtatccaacaatatataacaagaatgacatgttatagccaactggagtttatcctaggaatgcaaaattggtttaaaatgtaaaaatcaaactgtataattcaccacattaacaaactaaaacaaaaacaacaaaatatcatagcaaaaacaaaaaaaaaaacctaaagtcaaatcatgttttcattgcaatagaccaagagaaagcattgtcagattcagtattcatttatgataacatctctcagttaactaaaaatagaaggaaactccaacctggttaaaggtgttgatccaaaaaac

SEQ ID NO: 3729 - DNA, 454 bp, Homo sapiens
  source 1..454: mol_type = other DNA
tattcaccaaagacaaggaatcaacttaggtgcccatcaccagtggactggataaagaaaatttggtacatatacaccatggaatattatgcagccgtaaaaagaatgaaaccatgttctttgcagcaatatggatacagctgaaggccattatcctaagtgaattaatgcaggaacagaaaaccaaatatagcatgttctgacttataagtaggacctaaaccttgggtactcatggatataaaggtggcaacaatagacactggggaccactagagtggggagatggagcggagggcaagagctgaaaaactgactattgagtaccatgctcacaacttgagtaacaggatcagttgtaccccaaacctcagcatcactcaatatacccaggtaacaaacctgcacatatacccccgaatctaaaataaaagctgaaattatttaaaaaaaa

SEQ ID NO: 3730 - DNA, 280 bp, Homo sapiens
  source 1..280: mol_type = other DNA
tgtaatcccagcactttgagaggccgagacaggcagatcacccgaggtcaggagttcgagaccagcctggtcaacatggtgaaaccccatctctacaaaaaatacaaaaattagccgagcatggtggcgcacacctgtaatcccagctacttgggaggctgaggcaggtgaatcactgaaatccgggaggcggagattgcagtgagctgagatcactgcactgtactccagcctgagtgacagagtgagacttggtgaaagaaagaaagaaagaaagaaa

SEQ ID NO: 3731 - DNA, 868 bp, Homo sapiens
  source 1..868: mol_type = other DNA
gacttctggataaacttagtggatgcacctctcctttctctggaattcccattcaaacaaccacatagcgattttgaaaagctttaaattgcaaatgagaaagcaggagtagagaggaagctgagatattctggaagccagaaaacctctggatgagtgcaaagtgacctagcagagcagatatagcagcggggaaggaagcccaggcgaaagctgcccatgcagcagggcctggagaggctcaggacccagagacccaggatcctctgaagacgcaggtggggctgaagctgggggactggttgaaagtctgcagaagtaagtgggtcccttggtccagtgtggtcagatagttatcccttccttctcctggcagaagactgtggttctctgtgaagagactggaccacaagaactctggactcagggacgccagacacagttaaggtgagagatctgctaatggtgagatcccctaaacccttccccactcattgtttaggacgatgtcaaccagactcctaggtcaccagcgggatactggaggagttctctctggggagactgagcagcccaagtgaaaggcctacagatactgacaacagtgtatgtccagtaaaacggtacacttattctccctgcagtgaaaacctctgtccacatgtcctgtccaagcacgtagtaattccaaccactttgtctgagatttactcttaaacgtgagtgaggaggcaaagatcacaagacttcggggaaagttttgaacattagagacagatcagtaagaaacaaatggcaaagacatgaacaaacagaaaaaaagaatttggaggaaatagagacgctatacaaaggagcagaaaactct

SEQ ID NO: 3732 - DNA, 282 bp, Homo sapiens
  source 1..282: mol_type = other DNA
tgggcatggtggctcacacctgtaatcccagcactttgggaggccgaggtgggcggatcacttgaggtcaggagttcgagaccagcctggccaacatggtgaaacctcatctctgctaaatatatgaaaattagctgggtgtggtagtgcgcgcctgtaatcccagctactcaggaggctgaggcagaagaatcgcttggatccaggaggcggaggttgcagtaagctgagatgacaccactgcaccccggccgactctgtctcaaaaaaaaaaaaaaaaaa

SEQ ID NO: 3733 - DNA, 315 bp, Homo sapiens
  source 1..315: mol_type = other DNA
ggctgagtgtggggactcatgcgtataatctcagcactttggaaggccaaagtgagagaactgcctgagcccaggagtttgagaccagcctgagcaagatagtgagacatcctctcttaaaaaaaaaaaaaaaattacctgggtatgatggtgcacctataatactagctatttgggaggctgaggtgagaaaataatttgagtccaggagttcgaggctgcagtgagccgtaatcgtgccactgtactccagcctgggagatagagcgagatcctgtctaaaaaagaaaagaaaagaaaagaaaagaaaagaaa

SEQ ID NO: 3734 - DNA, 121 bp, Homo sapiens
  source 1..121: mol_type = other DNA
ttaccacagttagtcattaccttcttgattatgtgattgtgtggttaatagctatttcctccacttggtcacaagcttcatgaaggcacaagccttgctgttgtttcgaaaatcagcattg

SEQ ID NO: 3735 - DNA, 297 bp, Homo sapiens
  source 1..297: mol_type = other DNA
ggctgggcacggtggctcacgcctataatcccagtgctttggaaggctgaggcgggtggatcacgaggtcaggagttcgagaccagcctggccaacatagtgaaaccctgtctctactaaaaaatacaaaaaattagccaggcctggtggtgagcacctgtaagcccagctactcaggaggctgaggcaggagaatcacttgaacccaggaggcagaggttgcagtgagccaagatcgtgccattgcactccagcctggacaacagtgcgagactccatctcaaaaaaaaaaaaaaa

SEQ ID NO: 3736 - DNA, 897 bp, Homo sapiens
  source 1..897: mol_type = other DNA
agcatccctttatgattaaaactctcagtaaaatcagtatacaagggacataccttaatgtaataaaagccgtctaggacaaacccacagccaacataatactgaatggggaaaagttgaaagcattccctctgagaactgaaacggggcaaggatgcccactctcaccactcctcttcaacacagtcctagaagccctagtcagagcaattgaacaagagaaagaaataaagggcatccaaatcagtaaagaggaaatcaaactgtccctgtttactgatgatatgattgtttacctcaaaaaaccctgaagactcctccagaaagctcctagaacttataaaagaattcagcaaagtttctggatacaagattagtgtacagaaatcagtagctcttatatccacaacagcaaccaaacagagaatcaaatcaagaactcaaccccttttacagtagctgcaaaaaaaaaaaataaaatacttaggaatatacctaatcaaggaggcaaaagacctctacaaggaaaactacaaaacactgctgaaagaaatcacagacaacacaaacaaatggaaacacagctcatgctcatggataggtagaatcaatattgcgaagatgaccatactgccaaaagcaatctacaaattcaacacaacccctatcaaaataccaccatcattcttcacgtaattaaaaaaaaacaattctataattcatttggaaccaaacaagagcctgcatagccaaacaagactaagcaaaaagaacaaatctggaggcatcacactacctgatttcaaactgtactataaggccatagtcaccaaaacaacgtggtattggtatgaaaataggcacacagagcaatggaatagaatagagacagcccag

SEQ ID NO: 3737 - DNA, 753 bp, Homo sapiens
  source 1..753: mol_type = other DNA
aaagaatagagaacccagaaataaacccaaatacttaaagccaactgatatttgacaaagcaaacaaaaacataaagtggggaaaggacacccttttcaacaaatggtgctgggataattggcaagccacatgaaggagaatgaaactggattctcatctctcaccttacacaaaaatcaacacaagatggattaaagacttaaatctaagacctgaaactaaaaattctagaagataacattggaaaactccttctaagcattggtttaggcaagaatttcatgaccaagaacccaaaagcaaacgcaatgaaaacaatgataaatagttgggacataattaaactaaagaacttttgcacagcaaaaggaacagtcagtagaggaaacagacaactcatagagtgggagaaaatcttcataatctatacacctgacaaaggactaatatctagaatctgcaacaaactcaaacaaatcagtaagataaaaacaagcaatcccatcaaaaagtgggctaaggacatgaatagaaaattctcaaaagaagatatacaaatggccaacaaacatatgaaacaatgcttaacatcactaatgacaaggaaaatgcaaatcaaaaccacaatgtgataccaccttactcctgcaagaatggtcataatcaaaaaatcaaaaacaatagatgttggcctggatgtggtgatcaggtaatacttctaaactgctggtgggaatgtaaattagtatagc

SEQ ID NO: 3738 - DNA, 656 bp, Homo sapiens
  source 1..656: mol_type = other DNA
gagagatgaagccacttgagcttctgggtcagatggtgacttggagaacttttgtgtctagctaaaggattgtaaatgcaccaatcagtgctctgtgtctggctaaaggattgtaaatgcactaatcagcactctgtaaaatgcaccaatcagcactctgtaaaatggaccaatcagcgctctgtaaaaatggaccaatcaggaggatgtgggtggggccaaattagggaataaaagctggccacctgagccagcagtggcaaccccctggggtccttttccatgctgtggaagctttgttcttttgctcttcacaataaatcttgctgctgctcactctttgggtctgcactacctttatgaactgtaacactcatcgcaagggtctacggcttcattgctgaagtcaacgagaccatgaatccaccaaaggaacaaacaactctggacgcgccacctttaagagctgtaacactcactgcaaaggtctgtggcttcactcctgaagtcagcgagaccacaaacccaccgggaggaacaaacgactctggacacaccatctgtgagagctgtaacactcactgcgagggtccgcggcttcattcttgaagtcagcaagaccaagaacccactggaaggatccaattccggacaca

SEQ ID NO: 3739 - DNA, 667 bp, Homo sapiens
  source 1..667: mol_type = other DNA
taggttactcctaagtcttctctttctttcccttcctttatccaatttagcagcaagtctacctccagaatataaccttctcctccctatactctctcaactgcatttctccaaaggccccataaatggtcttccagcttcccttcctgcctccccttaactcattccttacatagcaaccaggagaatcctacagttgtgcattcttctgcttgaaaaatgtccagtgtcattcttttgctcttaaagtctaaaatcctctaccaagatgttcacggtcttgcatgggctggctcttgcctgcttctgcagtctcatctcacaccctctcccctttgctctgtatgtgctaggtattctggattccatctttcccaggccacctgcagcctttttgcacatttgggccttggaacctgttgttccctccacctaagaagttactcctctttcttctcatggccccacttccccaagaggcctcccctgaccatcctatttaacctattatttccttcataggacagtctatcattatcttggctatttactcttttatttgtctattatctgtctctccccattagaatgtaagcttcaagatgacaggaaccttgtaccatagctgactctccaggcactgtgtctagtacgtagtcgttgctca

SEQ ID NO: 3740 - DNA, 286 bp, Homo sapiens
  source 1..286: mol_type = other DNA
gccgagcgcggtggctcatgcctgtaattccagcactttgggaggccaaggcgggtggatcacctgaggtcaggagttcgagaccagcctgaccaacatggagaaaacccatccctactaaaaatacaaaattagccgggtgtggtggcacatgcctgtaactactcgggaggctgaggcaggagaattgtttgaactcggggggcagaggttgtggtgagccgagattgagccactgcactccagcctgggcaaaaagtgaaactccatctcaaaaaaaaaaaaa

SEQ ID NO: 3741 - DNA, 369 bp, Homo sapiens
  source 1..369: mol_type = other DNA
tgataagttcagagatgggcttatgactcaatttgtgccaatgagaattgtcctgaagcctcagcatatgggctgtgggaaagtgttttcccctttctctggactcctgtgtagaggacctatgagatggtgccacctcatccagtatatcgaggaaggaagaaccaagcaatggagagaggcatcatccatggcattatatgagtctctgggtccagctgggcctgaagcccatccttgggtttactggttatgtgagctgaaagttcactaatattattgtattcaatttttgtttagttacttattttgcttaagctacttgagttgaatttttgtctcttgcagtcaaaagagtactgacttaca

SEQ ID NO: 3742 - DNA, 309 bp, Homo sapiens
  source 1..309: mol_type = other DNA
gctgggcacggtggctcacgcctgtaatcccagcactttgggaggccgaggtgggcagatcatctgaggtcaagagttcaagaccagcctgaccaacatggagaaaccctgtctctactaaaaatacaaaattagccaggcatggtggcacatgcctgtaatcccagctactccggaggctgaggcaggagaattgctggaacctgagaggtgcaggctgcagtaagccaagatcgcaccattacactccagcccaggcaacaagagcgaaactccatctcaaaaaaaaaaaaaaagaaaagaaaaaaa

SEQ ID NO: 3743 - DNA, 308 bp, Homo sapiens
  source 1..308: mol_type = other DNA
gccgggcgtggtggctcacgcctgtaatcccagcactttgggaggccaaggcgggcgtatcacctgaggtcaggagttaaagaccagcctgaccaacatggagaaaccccacctctactaaaaatccaaaattagttgggtgtggtggcgcatgcctgtaatcccagctactccggaggctgaggcaggagaatcgctggaacctgagaggcggaggttgtggtaagccaagattgcacctttgcactccagcctaggcaacaaaagtaaaactccacctcaaaaaaaaaaaaaaaaaaaaaaaaaaa

SEQ ID NO: 3744 - DNA, 130 bp, Homo sapiens
  source 1..130: mol_type = other DNA
ggctgggcggggtgactcacatctgtaatcccagcactttgggaggccaaggcaggcagaacacttgaaggagttcaagaccagcgtggccaacgtggtgaaaccctgtctctactaaaaatacaaaaat

SEQ ID NO: 3745 - DNA, 304 bp, Homo sapiens
  source 1..304: mol_type = other DNA
gccaggtgcagtggctcacacctgtaatcccagcactttgggaggctgagccagacggatcacttgaggtcaggagttcgagaccaccctggccaacatggtgaaaccctgtctctgctaaaaatacaaaaagtagccaggcatggtagcatgcacctgtaatcccagctattcaggaggctgaggtgggacaatcacttgaacccgggaagtggaggttgcagtgagctccggtcgcgccactgcactccagcctgggcaacagagcaagactctgtctccaaaaaaaaagaaaaaaaaaaaa

SEQ ID NO: 3746 - DNA, 100 bp, Homo sapiens
  source 1..100: mol_type = other DNA
agaaaatattccaataggagataaacctatgtacacagagttgctcaccccagcattatctgtagtaacaattagaaacaaatgaaatattcaaaaacag

SEQ ID NO: 3747 - DNA, 797 bp, Homo sapiens
  source 1..797: mol_type = other DNA
gagacggagcagggacccctctttggggtgtgccagggggattcccacaagcacagaaataaaggagaatcttgagtttccttcaccgaaaactccaggcacccagctcgccccgagaaggaaaccagcaagctgataagcaagaaggtcataacagtttcaaacaatagccagggaagttagagtcacctagagacatccttaacacgtgcccctgagctacttttcagaaacccagacccccaccaaatggattcacacagacgtcagataagggggaacaccagggactaaactctgacctccattctttgctctcagtttcttcctgaggggcctggccagaccttaatgttcctttctgcggaccccaagtttttagacaaagctttgcttccttaaccaatcacaaatcagggagtctttgaatccaccataacctgtaagcccgccccctgcctaccccacttcacctttcaggccaaaccaatatataagcttcatgtagtgatttacaattttggtatacagccataccaccctgaaggcacccgatctcgactgatttacaattttgcctttaacttctgctttcctgaaatttaccactgcctttaaatactctagcttgtaggtcatcatggagattgggtctcaagcatgagctgcccaattctccttgcttggcgccctgcaaataaacatcctcctttctcctactgcaaaaaccacctttttgcagttttgctgttgaagtttgcctttactgtgcaggtgagcaaaccccagttcagttc

SEQ ID NO: 3748 - DNA, 300 bp, Homo sapiens
  source 1..300: mol_type = other DNA
gctgggcatggtggctcatgcctgtaatcccagcacttcaggaggccgaggcaggcagatacctgaggtcaggagttcaagaccagcctggccaacatggtgaaaccctgtctgtactaaaaacacaaaaattagctgggcatggtggtatgtgcctgtaatcccagctatttgggaggctgaggcaggagaatcacttgaacccaggaggcggaggttgcagtgaaccgagatcgcaccactgcactccagcctgggcaacagtgagatctgtctcaaaaaaaataaataaaaataaaa

SEQ ID NO: 3749 - DNA, 187 bp, Homo sapiens
  source 1..187: mol_type = other DNA
cttcctactcagaatgttcccacattcaagaacaccgttccctgtgtctagaacgccactcccttacctgttctccacttcaatcctacctgtcctttaagagccagatgaaattttacctcctctcctgaaacattccatagcctcctcagccaaaaacaccctctttagcaccagtctttagtct

SEQ ID NO: 3750 - DNA, 187 bp, Homo sapiens
  source 1..187: mol_type = other DNA
ttccttaaccaagtaatttcagaaaatgctcagttaaaccaagttaactttcttgactgcaaatcctggagacttaatatggcaacacatcctgaattcacaaaaggagtatgcagaacttcctggactacaggacccttcttttctcagactacctcaggagaccagtattccatggaacacactt

SEQ ID NO: 3751 - DNA, 233 bp, Homo sapiens
  source 1..233: mol_type = other DNA
tgcagttagcaccacactaatatcaaagcctgagaatagcagcatgaaagaaaactatagataaaatttgcttaaaaatatagatgcaaacatctgaaataaatagaaaaagaaaaatgcactaagatatagtagaatttataccctgagtgcaagaatagttcaatattgaaaaatctactattataagtaaccatagtaatataataaatctagggaagaaaaaatactga

SEQ ID NO: 3752 - DNA, 102 bp, Homo sapiens
  source 1..102: mol_type = other DNA
ttcttgagagcagagtttcgttattctcaatccttcacatttacttcactccttgccacataataagccttaagtaaatgttttgttgaatttgaaaatgaa

SEQ ID NO: 3753 - DNA, 428 bp, Homo sapiens
  source 1..428: mol_type = other DNA
tttccacaaatattacaccaagtatgacacccctcccacctccatcacctccttctgcctctgccacccttgagacagtaagaccaaacctgaatcttcctcctcttcctcagcctactccatgtaaagaccaccaggatgaagacctttatgatctacttccacttaatgaataataaacgtattttttcttccttatgatttctttaaaacattttcttctcaatggcttattttattgtaagaatacagtgttaatacatgtaacatacaaaatgtgttgatcaactgtttatgttatcggtaaggcttccagtcgacagtaggctatcagtagttacgtttggaggtagttaaaagttatacgtggattttttaccgcaaagggagtcagtgcccctcagccccatgttgtttaagggtcaagt

SEQ ID NO: 3754 - DNA, 1165 bp, Homo sapiens
  source 1..1165: mol_type = other DNA
ggctaatgtaccctgcctgtgctctacaattggaacaacaaagcctggatgtcagcagagaaaggtttattgaatattttaagcctactgttgagacatattgctcagaaaaagagattcctttccaaatattactgctcattgtcaatccacctggtaacccaaaatctctggtagagacgtacaaggagatgaatgttgttttcactcctgctaacacaacattcattctgtaacccatggatcaaggagtaatttagactttcaagccttattatttaagaaatgtctttcataggcctatagctgccacagacagtgattcctctgataaatctgggcaaagtatattgaaaacctcctggaaaggaatcaccattctcaatgccattaagaacattcatgattcatggagagaggtcaaaatatcaacattagcaggagtctggaaaaagttaattccaaccctcaaggatgactctgaggggtttaggagtatgatggaggaagaaactgcagatgtggtggaaagagcaagagaactagaattagaagtgtagcctgaagatgtgactgaattgctgcaactgcatgatcaaacttgatcaggagttgcttcttatggatgagcagagaaagtgatttcttgagatgaaatgtatttgtagtgaagatacagtgaacactgttgaaatgacaaaaaaaaatttataatattacataaacttagtttataaagcaacagcaaaagttctgtgggtaaaatgctatcaaaaagcactgcatgctagagacatctttgtgaaaggaagagcaaatccatgaggcaaacttcgttgttcttattttaagcaatcgtcacagtcaccccaaccattggcaaccaccaccctgatcagtcagcagccatcaacatgccatcaacatccaggcaaggccttccaccagcaaaagattaaaactctctgaaggctcagatgatcattagcatttttcagcaataaagtatttttaaactaaggtatgtatattttttagacataatgctgttacaaatttaatagactatagtatggtataaacataacttttatatgcactaggaaactaaaaaaatgtgtgactagctttatcgcaatgttcccttattgtggtggtctggaac

SEQ ID NO: 3755 - DNA, 300 bp, Homo sapiens
  source 1..300: mol_type = other DNA
ggacaggtgcagtggctcacacctgtaatcctagcactttggaaggccaaggtgggcagatcacttgaggccaggagttcgagactagcctggccaacacggcaaaaccgcatctctactaaaaatacaaaaaattagctgggtgtggtggtgcatgcctctaaccccagctactcagcaggctgaggcatgactgctcgaacccagaaggcggaggttgcagtgacctgagattgcaccactacacaccagcctgggcggtagagtgagactctgtcttaaaaagaaaaaaaaaaaaaa

SEQ ID NO: 3756 - DNA, 185 bp, Homo sapiens
  source 1..185: mol_type = other DNA
ctgctaatggaagaagattacatctaaaactttcatagctagagagaagtcaatgcctggcttcaaaccttccaaagacaggctgattctcttgttaggggctaatgcaactggtgactttatgttgaagcaaatgctgattgaccattccaaaaatactagggcccttaaaaattatgctaaat

SEQ ID NO: 3757 - DNA, 314 bp, Homo sapiens
  source 1..314: mol_type = other DNA
caggcatacctccttttattgtacttcacatatactgcatttttccaaattgaaggcttatggcaaccctgcatcaaacaaatcttgtggcaccatttttccaacaccatgtgctcaattcgtgtctccaagccacattttggtaattctcacaatatttcaaacttttacattactattattattatgtctgccatagtgacctgtagatagtaatctttgaaattactactgtaattgttctggggcacaccaaaccatgcccatataagacagtgaacttaagtgacaagtactgtgtgtgtctggactgc

SEQ ID NO: 3758 - DNA, 89 bp, Homo sapiens
  source 1..89: mol_type = other DNA
tatgatattgtgatttatgatgaaataaatatatttggtctttgtttcctggcacaaatctcctaaaacccctgaatctcccaagtaat

SEQ ID NO: 3759 - DNA, 215 bp, Homo sapiens
  source 1..215: mol_type = other DNA
acaagtacagaaatcaagcctgttcagaaactctttgagcattctgacaggataattttatgtctcttgataaaagacagttttaaatggggttaaatatatgtctttttaaaactccacttctctggtaactaattttattgtatttcaccaaaagatataatggattgaatttttttagtgggtctcttaccacagacagtttgaaaagcact

SEQ ID NO: 3760 - DNA, 191 bp, Homo sapiens
  source 1..191: mol_type = other DNA
gcacaatgtagtagttaaactcaagccagcctgggttcatatcttggggccaagcaactcaccagccacagaaggtactttacctcctccttaatgcttcatttcctcatctataaaattagaacaataactgcctcatagggctttcagaggactagatgggttaattcacatggactgataacaatgcc

SEQ ID NO: 3761 - DNA, 581 bp, Homo sapiens
  source 1..581: mol_type = other DNA
gtagtcttctgatttccttatttccattcttccgcccttttctcttttcagcaaccagagtgaatttaaagaataatcttctagcatattttaatgtattcagttagagtcaggtctttactgtggctaaaggccctacgtggccttgtagcttgctcctccctagagttttctactctttgcctcctctttgtgtattcctcgaacatacacatgctctcatcatagggctttggtgttgctactccctctgcctggaatactctgcccttatgtatgtgtaaacttgatttatccctttatttcagatcctgttgaatctcacttttcagagagactttccataaccacttggcccccatagagtaaaccttcttgcccttttgctctcttgtatttttcatcttaccatcaacagccctgacatgttctacatatatattactaccaccctcacttaagggaatatgttcattgagagcagaattgtctcttttattcattgttctgtcctcagtaatagaattgtacatacctgccatgtagttggtactcagtaaatatgtgttgaaggaaggagt

SEQ ID NO: 3762 - DNA, 289 bp, Homo sapiens
  source 1..289: mol_type = other DNA
agaagtatgggctaccacctactacttgtgactggtgcctgaagtgggagacatcttgtggaactggagccctcaacctgtgggacctaaggctatctccaggtggacagcgtcagaacaggattaaatcggaggacacccagctggtgtctgctgaggaatctggtgtcagaactgactggctgctggtggtgaggaggaatccctacaaattttgatgaccatagatcacagaagcactcggtgttgtgagagtatagtaggagaaactgattttgtgttttcctat

SEQ ID NO: 3763 - DNA, 1150 bp, Homo sapiens
  source 1..1150: mol_type = other DNA
ttattgagaggatgaggagctaagccacagatggagagaaaatatttgcaaaagatatatctgataaaggactgtaacccaaaatatacaaagaactcttaaaattcaacaataaggaatgaacaacccaattttaaaatggtcatttatctgaacagaagtttcaccgaagaagacacagatggcaaataagcatatgaaatgatgctcaacattacatgttcttaggggattgcaaattaaaattaaaagaacaatgaaatactactgcacacctattagaatggccaaaatgtaaaaaaagaaaaaaaaaagacaacatcaaatgctgatgaggaagtgaggcaacaggaacactcattcattgctaatggtaatgagaaatggcacacccactttgtaagactggcaatttcttacaaacacactcttaccatatgatccggcaatcatagttcttggcacttacccaaaggaattaaaagcttgtgttcacacaaaaacctgcataaaatgtttacatcaactttattcattattgtcaaaccttggaagcaaccaaaatgtccttcaatacgtggatggatggataaattaactgtggcaaattcagacaatggaatattattcagcgatagaaaagaaatgaactattatactataaaaacaagtggaggaaaagtaagtgaatgcaattaagcaaaaaaaaaaaacaatctgaaaaggccacatattgtatgattccaactatgacattctggaagaggtaaaacagcgaaaagagcagtggttactagtggttaacagaaaggaagaggtgagtaggtgcagcacagaggatttctagggcaatgaaactcttccgtttgatgctaacatgaaggatacatgacattatacatttgttcaaacccacagagtatacaacaccaagagtgaacctcaatgtaaactatggagtttggctgatgataatgtgtcaatgtcagcaggttaatcagttgtaacaaacactccactctggtggaggacattgatagggaggctgtgcttacctgggggtagagaatatatgggaattccctgtactttccactaaatttttctgtgaacccaaaactcctctaaaaaaaattgtttacttttaaaa

SEQ ID NO: 3764 - DNA, 1937 bp, Homo sapiens
  source 1..1937: mol_type = other DNA
aggcatacattgttttattgcattttgcctgattgtgcttcataaataccatgtttttggtttttttttttttttacaaattgaagttttgtggcaaccttgggtacagcaatatcggcagcatttttccaacagcaagtgcttactttgattctctgtgttacattttggtaattttcaaaatatttcaaatattctcattattttattgtatcagtcacagtgatctatgatcagtgatctttgatgttaccattgtaactatttgtgggtgccatgaattacacccatatatgatggtgaacttaattgataaatgttgtgtgtattcagactgctccaccaactggctgttcccccatctccctccctgtccttgaacatccttgttccctaaaagcagtaatattaaaattaggccaattaataactctacaatgacctctaactgttcaagtgaaaaaaagtcatatgtctctcactttaaatcaaaagctagaagtgactaaacttaggaaggcacatctaaagctgagataggctgaaagcaaggactcttgggccaaacagccaagttgtgaatggaaagaaaaaattcttcaaggaaattaaaagggctacaagtgttcttgatgatatgaagaaagttttagtaatctggatagaagatcaaaccagccacaacattcccttaagccaaaagctaatccagagcaaggccttaactgtctccaattctgtgacacctgggagatgtgaaaatgctgcagaaggaaagtatgaaagtagcagagattggttcgagaggtttaaagcaaggtaaaaagtgcaagctgaagcagcaagtgctgatgtaaaagcagcaggttattcagaagatctaactaagataacggatgaaggtggctcaactaaataacagattttcagtatagacaaaacatctattagagacatctaggactttgatatctagagaggagaagtcaatgtctagctccaaagcttcaaaggatgagctgactcctgtcaggggctaatgtagctggtgacatcagggtaaagccaatgattatttaccatttcaaaaattctagggtccttaagaattatgctaagtcaattctgtctgtgctctataaatggaacaacaaagcctcaatgacagcacatttgtttagagcatgatatactgaacattctaagcctactatcaaaacttactgctcagaaagaaaggttcctttcaaaatgttactgctcattgacaatgaaccaagtcactcaagagctctgatggacatgcacatgattaatgcattttcaagcctgttcacacaacatctattctgtagctaatggatcaaaatgtaactttgtccttcaagtcctattatctaagaaatacatcttgtaagaatatagctgttatagacagtgattcctccaatgaatgtgggaaaggtgaattgaaaaccttttggaaaagattcaccattctagatgccattgagaacattcatgattcacaggaggtagtcaaagcttcaagacttcagtggaggaagaaactgcagatgtggtagaaactagtggagcctgaaaatgatgactgatgcaatcatgatcaaacttgaacggatgaggtgcttcttatgaatgagccaagaaagtttcttgagatgacatctacttctggtgaagatgctgtgaacatggttgaaatgtcagcaaaggatttagaatattccataaacttgtttgacaaagcaggggcagggtctgagaggactgactctaatgttgaaggaagttctactgcaggtgaaatgctatcaaacagcgtcataagctgcagagaaattttctgtgaaaggaagagtccattgatgtgacagacttcactctcgtcatattttaagaaactgccacatcca

SEQ ID NO: 3765 - DNA, 431 bp, Homo sapiens
  source 1..431: mol_type = other DNA
ttatgtactgctgataggaatattcattggtacaaccatttagaaagacagttaggtattatccagttaacaaaaacaaatgtgtataccctgtgactcagcaattttccttctaggtgtttcctagagacttctgtactgtataccacgagacatggaggctctccagcacagctttatttgtgttaataatggtttaaaaaaataaacccaaactacttgaatgtttattaaagtgaaataaacaaattatgatatgatcaaatgacagaacacaatacaacaatgaaagtgaatgatctaaaactatataggagcaatatagatacatttcagtaacctgatatgaagccaaaaaagttacgttgcagaaaaattcaaaatatgaatgattatttttgtaaaatttcaaaagtatgcatcattaaaca

SEQ ID NO: 3766 - DNA, 132 bp, Homo sapiens
  source 1..132: mol_type = other DNA
gaaattatactacatatgtgttactaggcatatttaaaataagttactggtaaatggagttgcattctatagtcacttaataaatattaacaaaatatttataactggaaccttaatgaaatgtatcatcaa

SEQ ID NO: 3767 - DNA, 118 bp, Homo sapiens
  source 1..118: mol_type = other DNA
taaaaaatcagaatacaacagattcccatttattttaaaatgaaattagctaggcatcatatatatgaatgaaagatcagaatgaaacacatgaagatgttaacaatgattgttttgg

SEQ ID NO: 3768 - DNA, 190 bp, Homo sapiens
  source 1..190: mol_type = other DNA
tgttcccatggcacctgtattgtactcttatcagtcattatatggactttaacttccccagatattatttgggctcctccataagactgtgagcatctgaccactggagtgttgcttcccattatatccctgttatcaagcacaaggtcaggcacagagtaagactcaaaacatgttttggaatgtatga

SEQ ID NO: 3769 - DNA, 311 bp, Homo sapiens
  source 1..311: mol_type = other DNA
ggccgggcacggtggctcacgcctgtaatcccagcactttgggaggccgaaaggccgggcagatcacctgaggtcaggagattgagaccattctggccaacatggtgaaaccccgtctctactaaaaatacaaaaaattagctgggagtggctacacacctgtagtcccagctactcgggaggctgaggcaggaggatcacttgaacccgagaggcagaggttgcagtgagccgagattgcgccactgcactccagcctgggcagcagagcgagattccatctcaaaaaaaaaaaaaaaaaaaaaaaaaga

SEQ ID NO: 3770 - DNA, 620 bp, Homo sapiens
  source 1..620: mol_type = other DNA
gaagttaaaatctcaacagaatggtaatgaaagataaatctgagaaagtatgacacaaagacaaaaggtaagaaggaaaggaaggattaggggacaaaatcttcaaataaataattcaggaaaattccccaaaatggaagttcacaaaagagcatgctgcactccctacacaaacgataaaaacaaacccacatcaagacacatcctgatgtatcagaacaatggaggcaaaagaggagagtctaacaattccagaaagaagaaacaggccaaagagcaaagatcaagacttcaggcaactctggaagccagaaaagtctacaatggagaaatgctttcaaaattataaaaatgatttccaatctacatctatattcaatcaaaatcttaccaaacatggggagagaataaagatccctgcagagatgtatggcctcaatgttttccatccctgaaccctcaagaatcactggaagatgtgctgtatcagaaaataggggagtaacaggaaagacatgacacccaggaaacgggttcctctacgaagctaaaaggaatctccaaaagaatggtaaaaagaggtttcccaagagcacagttaaacagcaagccaagaaagc

SEQ ID NO: 3771 - DNA, 180 bp, Homo sapiens
  source 1..180: mol_type = other DNA
aactaaaaactgatgaaagaaattaaagagaacacaaacaaatgtaaagacatcctatattcatggatcagaagaactattattgttaaaatggccatactactcaaagcaatctatggattcaatgcaatccctaccaaaaataccaatgacattctccatagaaatagaaacatatcc

SEQ ID NO: 3772 - DNA, 305 bp, Homo sapiens
  source 1..305: mol_type = other DNA
gccaggcgctgtggctcacacctataatcctagcagtttgggaggccgaggcgggcagatcacctgaggtcaggagttcgagaccagcgtggccaacatggcaaaaccccgtctctactaaaaatacaaaaattagccaagtgtggtggcacgcgcctgtaatcccagctacccaggaagctgaggcaggagaattgctggaacctgggaggcagaggctgcagtgagccaagattgcaccattatactccagcctgggcaacagagcaagacaccatcaaaaaaaaaaaaaaaaaaaaaaaaaa

SEQ ID NO: 3773 - DNA, 888 bp, Homo sapiens
  source 1..888: mol_type = other DNA
tttattgcactttgcacatactgcattttttacaaattgagtttgtggcaatcccatgtcaagaaagttgatcagtgccatttttccaccagcacacgctaacatgtctgtcactttggtaattcttgcagtatttcaaacttttaaattatgtatctatcatggtgatcagtgctctttggtattactattgtaattgttttggggtgccacgagccacacccatataagatgatgaacttaatcagtaaatgttgtgtgtgttccagctgctccaccaactggctattcccctcttttctccctctttctgggcctccctattctctgacagtattgaaattaggctaattagtaaccttacagtggcctctaagtgttcaagtggaaatcagagttccccgtcttttatccaaaagctgtaagtatgtaagtttagtgaggaaggcatgtggacagctgagacaggcctgaagctaggcctcttgcaccagttagccaacttgtgaatgcaaaggaaaagttattgatggaaattaaaagtgctgctctagtaaacacacaaaggataatatgaaagcaaagcagccagttgctgatgtgtagaaagtttgagttggtttagatagaagatcaaactagctacaaaattcccttaagccaaagtgtaatccagagcaagccctaactcccttcagttctgtgaagtctgagggagatgataaagctgcaggagaaaagctggaagccagcagagatttattcatgaggtttagggaaagaatctgtctctgtaacataaaagggcaaggtgaagcaacaagtgctgatgtaggagctgcaataagttatccagaagatttagctaagagcactgacgaaggtggt

SEQ ID NO: 3774 - DNA, 295 bp, Homo sapiens
  source 1..295: mol_type = other DNA
ggagcggtggctcacgcctgtaatcccaacactttgggaggctgaggaaggtggatcatgaggtcaggagatcaaaaccatcctggctaacacggagaaaccccgtctttactaaaaatacaaaaaaaaatagctgggcctggtggcgggcacctgcagtcccagctacttgggaggctgaggcaggagaatggtgtgaacccaggaggcggagcttgcaatgagccgagatcgagccactgcactccagcctgggcaacagagcaagactccgtctcaaaaaaaaaaaaaaaaa

SEQ ID NO: 3775 - DNA, 1476 bp, Homo sapiens
  source 1..1476: mol_type = other DNA
ctctcatgtgtactcaactattccctctcaaatgaatcctttccattgactttcagacttgaatacagctctcccatctcacctgtaaacaaacagctcctccctgactcctttagctccctgcaggtattgctttctttcctactctttatagcgagatgtgctgaaagcacttccctgtcttcactttcttgccttccatgcacccttctctaatttagcttccagcttcatcaaaacaacttttacttgcaatgactgactgttgtccatcccatagtcctcttcttagtaaacttaacagcattaaataaaaactgtcttcttctggagcaccaacttcccttggcttccaggatagcccagcctcctcctccttcaggtctggtgatatactctcagtcttgtctgccaggaatcagttactaatactggcaacgtcaaaatccctcttcttttttaccccctaccgtctccaaagttggtttcaacgcccttccttggcttgctatgagaatgacataggctagttataggatctgctcatttaataattgtgaggatataatgagttcatatatggaaagtacttaaagtaatgccaggcaaatgatagttgccccttgagtcgatagctgtagttacaatttgtggatgaaacctgaatgacatcagtccatacctatgtattcagtggcctataactatctccatattcaactctaaaggcacatcaaactcagtgtatccaagaccaaatgtatgtcattcttgtgcttcatcctgacaaaaataaacctggtctctcctagtgtgtcctgcttcaatgagtggtccaaccattctgtcatttgcacaagccagcaaagtaatttggcccactaaatttctatgaaaagcttccatttctcaacattccctctgccagcacaatagccagagataccatcatctctcttctgagttctataaaaagagattgccttgttttcattctgtcgactcatcaccccctataagttctccccccaacccccattgccagaatgcttatttcagaagaccaccctgagcccccctttgcttccagcctttccatggcttcccgtgactctcaggataatgaccaaaatccttcacatggtttgccaagcccagcctctgaggactgtcccacacatctcccatcccacctcctgctgttctctccactccagctgtgcatgtcactttcagctgctcacacacactttactctccctgaccagaggatttgtacatgcaattcatcatgctggaaagctctctccacctttataagcaatgtcttatgcatccattatcacagctcaaacctctctttttcggggaagactttcttgacctcctagtctacttcaggttactatgttataaactcccacaaactatattcttcttctttagaatatgtacctcattttttaattgtagtat

SEQ ID NO: 3776 - DNA, 208 bp, Homo sapiens
  source 1..208: mol_type = other DNA
ggtattgtggaagggttatgatcatgggccctaaagtcagagcgcctgggattaagttgtcacaggcactatggcccttgcgagttgctttctcaaacttccttcagtttccctatctgtcagttaagtcggtattacctgcttcatagggttatgggaagaattaaacaatatgtgtaaagcacttactagcacactgcctaacaca

SEQ ID NO: 3777 - DNA, 291 bp, Homo sapiens
  source 1..291: mol_type = other DNA
gtgtctcacatctgtaatcccagcacttggggaggctgaggtgggtagatcacctgaggtcaggagtttgagaccagcctggccaacatggcgaaaccccatctctaataaaactacacaaattagtcaggtgtggcggtgttcacctgtaggcgcctgtagtcccagctactcaggagactgaggcagaagaatcacttgaaccccgggaggtggaggttgtagtgagccaagatcgtgccactgcactccagcctgggcgacaaagtgaaactccgtctcaaaaaaaaa

SEQ ID NO: 3778 - DNA, 256 bp, Homo sapiens
  source 1..256: mol_type = other DNA
cagggttaatcatcccagaactgtttgatagcaaaagactaaaacaactcaagtgcctaccaacagtggacaggttacataaaatataatgcatttgcataatgcagtacatgcaactgtgtacaggaagctctgtatgttctcatagggaaagttctccaagatagattgttatgaaaagggcaagtgcagaaaagtctacacagtctgctacctgacaagaatgaaaaaagtgaagaaaacacgtatcattcat

SEQ ID NO: 3779 - DNA, 121 bp, Homo sapiens
  source 1..121: mol_type = other DNA
ttaaaaactatgtggccatcaccaaattagttattttgaaccttaatttcttcacctctaaaatggaggtaatacttaccttaagtggctatgagaatgaagatcatgtgtatgaattgtt

SEQ ID NO: 3780 - DNA, 790 bp, Homo sapiens
  source 1..790: mol_type = other DNA
agatgctgcctatatgttgatgttgcagacgttaagtcactagcccacagccttgtattccatactcagagaccctgctacttacttgacatctcaacttgaaagtccaattaatatgcacttcaaactttaataggcttcaaacagaatttctttcattatctctgcaaaacagcttctctcatcatcttgaaattagtgaatggcattttactgttttagttggagtcatttctgtggttttctttcacatcctacataacaatccatcagtaagttctatgagctcttctttgaaaacaaacagaatccaactgtttcattcccacttctgctctggtcaagccactgccaacactcacctttattattgtagcaccctcattgcctagttctgtcccacagatttccaataaaaggtgaataaaatcaggtcactcttctgctgaaaaccctccaatggctctcatttcgctaaaaagaaaacccaaagtcctttcagtaccttgcaaggccccacactctggctcttgttatctctttggcctcaaatcccactactcctttccttcctcgcgcagctccgctagcctcaaacttgctgtaagtatgtatctttcagggactatatattgacagttccctttgtgtgggcaactcagcttctagatttaagtgttgctgcctcacttctttcaaataacaccctctgtgtgaggctggttgtgaccccactggcattacaatcctgctcccttcctcacggccttcccactatatttttccctgc

SEQ ID NO: 3781 - DNA, 932 bp, Homo sapiens
  source 1..932: mol_type = other DNA
aaagatgtctttaacaagacacaaaaagcgtaaaccataaagggaaagactgacgaatgtaaacgttaaaaatcaaattgactatattgttaataattcgtgtatatcaaaaaagatagcataataaaagtaaaacaataagtaccagcttggcaaagatatatgtaaaatatataatggacaaaatgttagaatcctgaatacataaagcattcctatagatccatgaggaaaggacaaaatgaaaattttaaaactatggcaaaaaatgttaacaggtacttcttggaagcatgagtgaggaataagcacctaaaaatatataagaagtacatattaaaagcataggatataacatttcatatctatcaaactgaggaaaaccaagttgtctgacaatatcaagggctcagctgatatggagcaatcaaaacccttatgtactgctgtgtgtgtgtgccaattagtgtatttgcttttggaaacagtggttatttgtaaagcactctgcaaacagtggtattgtgtaaagcaattttacttctaggtgtttacttagagggattcttggaggtgtggacaggagatctccacaagaatgtttctagcaacactgtaatttcaaaaacctgtaaatcacccaaatgtccttcaatagtagaagggatgcatatattttggtagtatgtataaaagggaataccattcagcagcagaaacaaatagattacaggtaggttcaaaaacgaggatgaatctcaagaatataatgccgaagaaaaatagcaagttgcagaagaatatgtacactatagatccatttacacatgtaaaactatgacatgttgaggccacaaacatatagtaaaacttaaaaaaaaagggataaataaaaattggacagtggtcatctcttgggagttgggaaaggg

SEQ ID NO: 3782 - DNA, 940 bp, Homo sapiens
  source 1..940: mol_type = other DNA
gaaaaagaaattacaggtataataaggactaagaagaaacaaaattgtttgtatacacagaatatatggttgtctatgtaaaaaaaacaaacaaacccacaagaatatgcagatacaagaatgagaggtagcaaggctgctggatacaaaaatcgaaatcaacattagctaaaaacagaaaatgtggtaactaaaaatataccatacgaagtagtgttaaaaagcataaagtccctaggaaatattaacaagaagacctttatggagaaaattataaactttattgaaagatatttcaaaggcctaagtaaatgaagagctgtaccatattcatgtattggaagacaacattgtaaagatgacatggtttaccagattaatctataaattcaatacaaatccaatcaaaatttcaatgctcttgggtttgtttgatttataaattgttggtctaattctagaagtaatatggaggaacagttggctaagaatagccaagacactccaaggaagaacaattttgtggtgatactggagacagaggtgaaattggttacaattatgacaaaatgtggaggcatcttggtttttatcagaccttttcctaaagttgcaataatcaggactgtactgtactgctacaagattagacaaattgatgtcagtcagaatagaaaccatcaaaagacccacacacatacacaaaaatttaatttatgaaagaggcagtgttacaaatcactggggaaaggatgaacttttcagtaaatagtgcagagacaaccacttcgaatatgaaaaatgttaagttgaatttctaactcataattttcacaaaaatcagttcaggacagactaaagacaaatgtgaaaggcaaaactataaaatttccacaaggcagtaaagaatatatttatgactttgggtaggaaaggatct

SEQ ID NO: 3783 - DNA, 135 bp, Homo sapiens
  source 1..135: mol_type = other DNA
agtgaatcaagtgcccacagatttgcaggcttaagcagaacaagggaagattgatatttttggatatgctatagcagctttctcctatgaaataaaactgatgatgtttggaagtatactactctcaaaggtgtc

SEQ ID NO: 3784 - DNA, 74 bp, Homo sapiens
  source 1..74: mol_type = other DNA
ttgtatgtgtaattttttttcttaaagactcccaattttgtaatattcaggcaccacagaaccaagatctgccc

SEQ ID NO: 3785 - DNA, 169 bp, Homo sapiens
  source 1..169: mol_type = other DNA
caggggtggacttatgacactactgaaacttagacttcaaggttcctcacctacagggccctcttcctgtgctctaataatatagagggctcgatggatatgtgttcatatggtaacaggcttttgtaaaaattgcagaaataagattttaacagcaattgcttaaagc

SEQ ID NO: 3786 - DNA, 296 bp, Homo sapiens
  source 1..296: mol_type = other DNA
gccaggtacagtggcttatgcctctaatcctagcactttaggaggccaaggcagatggaattgagcccagaagtttgagaccagactgagcaatatggtcaaaccccaattctgcaaaatacaaaaataaaaaatagctgggagtggtggtgcacacctgtagtcccagctacttaggaagctgagatgggaggatcacttgagcctgcagtgaatcataattgcaccaatgcactccagcctgggcgacagagtgagagacattgtctcaaaaaaaagaaaaagaaaaaaaagaa

SEQ ID NO: 3787 - DNA, 1628 bp, Homo sapiens
  source 1..1628: mol_type = other DNA
gaaaattggtaaagaggagtgaggcattgctagaaagatacctgaaaatgtggaaacagcagtggaactgggaaatagacagaggttggaagagtgtggagggctccgaagataggaagatgaggggaagtttggaatttcttagagatttgttaaattgttttgaccaaaatactgatggtgatatggacaatgaagtccaggctgaggaggtctcagatggagatgagggacttattgggacctggagtgaaggtcacttttgttaggacattgtggttggagacattgtgcccctgccctaggaatctgtggaactttgaacttgagagcgaagatttagggtatctggcagaagaaatttctaagcagcaaagcgttcaagacgtggcctggctgcttctggtagtctgtgctcatatttgtgagcaaagacatgacaagaaactggaacttatatttaaaaaggaagcagagtgtaaaagtttggagaatttgcagcctggccatgttgtagaaaagaaaaaaaccattttctggagaggaattcaagctagctgcagaaaattgcaagtaacaaggagcaaaatgttgatagccaagatagtgggaaaaacaccttgaaggcatttcagataccttgggggcagcctctcccatcacaggcccaaaggcctaggagggaaggatggtttcctgggccaggctcagggtcctgctgccctgcacaacctcaggaaactgctctccaaatcccagctgctccagctccagcttcagctcaaagggccccaggtatagctcaggctgctgctccataggatgcaagttataagccttagtggctcccgtgtggtgttaaattaagcctgtaggtgcacagagtgcaagaattgaggcttgggagcctccaactagatttcagagtatgtgtgggaaagcctggatgtccaggcagaagccagctgcagggacagagccctcatggagaacctctactagggtagtgtggaggggaaatttggggttggagttcccacacagcttcccctctggtgtactgcctagtggagctgtgagaagacagccactgtcctccagattccaggatgatagatctgccaatgacagcttgcactgtacaactggaaaagccacaggcagtcaatgccagcccgtgaaagcagtgacagtggcttaccctgcaaagtcccaggggctgagctgcccaaggccttgggagcccaccccttgcaccagtgtgccctggatgtgagatatggagtcaaaggagagtattttggagctttaagatttaatgactacctgctgggtttcagacttgcatgggtccagtagcccctttcttttggccaatttctcacttttggaatgggagtgtttacccaattcctgtacccccactgtatgttggaagtaactaactgtttttttattttgtaagctcacaggtgggagagacttgccttgtctcaggttgagactctggactttggacttttgaattaatgctggaatgagttaagactttgagggactgttgggaagatataactgtattttgcagtatgagaaggacatgagatttgggagacaccagaggtgga

SEQ ID NO: 3788 - DNA, 292 bp, Homo sapiens
  source 1..292: mol_type = other DNA
gccaggcgtggtggctcactcctgtaatcccagcactttgggaagccaaggtgggctgatcacttgatcccaggagtttgagaccagcctgggcaccatggtgaaacctcgtctttaccaaaaaatacaaaaattagctgggtgtggtggtgcacacctgtagtctcaactattggggaggctaaggtaggatcacttgatcccaggaggcggaggttgcagtgagttgcagtcacacccctgcactccagcctgggtgacagctagaccctgtctcaaaaaaaaaaaaaaa

SEQ ID NO: 3789 - DNA, 97 bp, Homo sapiens
  source 1..97: mol_type = other DNA
cattttataggttttaaaacctaattctgaggaggactcagtagacctctacagactgccaaaggcgtttatggcacaaaaaaggttcagcacccct

SEQ ID NO: 3790 - DNA, 307 bp, Homo sapiens
  source 1..307: mol_type = other DNA
accaggcatagtggctcacccctgtaatcccagcactttgggaggctgaggtgggtagatcacttgaggccaggagttcgagaccaacctggccaacatagcaaaaccccatctctactaaagatacaaaaattagcagggtgtggtggcatgcgcctgtaatctcagctattcaggaggctgaggcaggagaattgcttagaacccgggaggtgggggttgcagtgagctgagatcacacaactgtgctccagcctgggcaacagagtgagactgtctcaaaaacagaacaacaacaacaacaaaa

SEQ ID NO: 3791 - DNA, 316 bp, Homo sapiens
  source 1..316: mol_type = other DNA
gctgggcacggtggctcacagctataatctcagcactttgggaggctgaggtgggagaattgcctgagcccaggagttcaagaccagcttgtgcaatatagggagactccggctctacaaaaaagagtttttcaaaattagccaggcgaagtggcacacatctgtggtcccaggtgctcaggaagctgaggtgggaggatcacttgagcccaattcaaagctgcagtgagctgtaattgcatcactgcactccaacctgggcaacagagtaagaccttgtcttaaaaaaaaataaaaacataaaaaaaaataaaaa

SEQ ID NO: 3792 - DNA, 293 bp, Homo sapiens
  source 1..293: mol_type = other DNA
ggccgggcctggtggttcacacctgtaatcccagcaccttgggaggctgaggcaggtggatcacctgaagtcaggagttcaagaccagcctggccaacatggtgaaatcctgtctctactaaaaatacaaaaatttgccaggcatggtggcgggcgcttgtaatcccaacttctcgggaggctgaggcagaattgcttgaacccaggaggcggaggttgcagtgagccaagatcgccccatggcacttcagcctgggcgacagagcgaggctgtctccaaaaaaaaaaaaaag

SEQ ID NO: 3793 - DNA, 262 bp, Homo sapiens
  source 1..262: mol_type = other DNA
ccagacgcagcaactcacccctgtaattccagcactttgggagactgaggcaggaggactgcttgagcccaggagtagagaccagcctggacaacatggcaaaagcccgcttctgtaaaaaaactaaaaattagccaggcgtggtggtagcacgtgcctgcagtcccaggaagctgaggtggaaagaccacttgagccctgacggtggatgttgcagggagatcctggcattgcgccctgtctcaaaaacaaaatagcaaaa

SEQ ID NO: 3794 - DNA, 53 bp, Homo sapiens
  source 1..53: mol_type = other DNA
tttcagcacctacacagtgcctggcacatagtaggtgcccaataaatatttgt

SEQ ID NO: 3795 - DNA, 133 bp, Homo sapiens
  source 1..133: mol_type = other DNA
gttttaaatttttctcacttttaagttctagtaccataaatattgatagctataacccacatacccaaaagctttttggggtccttgatgatttttaagaggtcctgagagaaaaaaattttgagaaccactg

SEQ ID NO: 3796 - DNA, 303 bp, Homo sapiens
  source 1..303: mol_type = other DNA
gcctggtgtggtggctcacgcctgtaatcccagcactttgggaggctgaggtgggcagatcacctgaggtcaggaattcaagaccagcctggccaacatggtgaaaccccgtctctactaaaaatacaaaaattcactgggtgtggtggcatgtgcctgtaatcccagctactccggaggctgaagccacagaattgcttgaacccaggaggcggaggttgcagtaagccaagatcatgccactgcactgcagcctgggcggaagagtgagactccgtctcaaaaaaaaaaaaaaaagaaaaa

SEQ ID NO: 3797 - DNA, 129 bp, Homo sapiens
  source 1..129: mol_type = other DNA
cactgccatcctgtggaagccaccatcatctctggcccaagcttctgtagtagctccctaaaataataccctatcatctgctcctaatccctccaatctctctccactgagtggctggaatgctttttt

SEQ ID NO: 3798 - DNA, 303 bp, Homo sapiens
  source 1..303: mol_type = other DNA
ggctgggtgtagtggctcacacctgtaatcccagcactttgggaggccaaggcaggtgggtcacttgaggccaggagtttgagaccagcctgaccaacatggcaaaaccccatctctactaaaatacaaaaattagctgggcatgatggtgcactcctgtaatcccagctacttggtaggctgaagcatgagaattgcttaaacctgggaggcagaggttgcagtaagccaagatcatgccactgcactccagcctgggcaacagagtaagactctgtcttaataaataaataagaaaataaa

SEQ ID NO: 3799 - DNA, 273 bp, Homo sapiens
  source 1..273: mol_type = other DNA
ggcatggtgactcatgccaataattccaatattttgggaggcagaggcaggaggctcacttgaagccaagagtttgagaacagattggacaacaaagtgagatcccatctccacaaaaaataaattagccaggtatggcagtacttgcctgtagtccaagctactcaggaggctgaagagggaggatcactccaaggccaggagttaaaggctacagtgagctataatcacaccactgcactccagcctgggtgacagatccttttttaaaaa

SEQ ID NO: 3800 - DNA, 308 bp, Homo sapiens
  source 1..308: mol_type = other DNA
ctgggcatggtggctcacacctgtaattgcagcactttgggaggctgaggcaggcagatcacttgaggtcaggagttcaagaccagcctggccaacagggtgaaaccccatctctactaaaaatacaaaaattacccaggcgtgatggtgggcgcctgtaatcccagctacacaggaagctgaggcaggaaaattgcttgaaccggggaggcggagattgcagtgagccaagattgtgccacttcattccagcctgggcgacagagcgaaactctgtcaaaggaaaggaaagaaaagaaaaaaaaaaa

SEQ ID NO: 3801 - DNA, 78 bp, Homo sapiens
  source 1..78: mol_type = other DNA
tgcctagcctgctttctttctcacatgacagctgggagtattaaatgagataaagttgcagcctagcccagtgtctgg

SEQ ID NO: 3802 - DNA, 298 bp, Homo sapiens
  source 1..298: mol_type = other DNA
ggccaggcacggtggctcacgcctgtaatcccagcattttgggaggccgaggcaggcggatcacgaggtcaagagatccagaccatcctggctaacacggtgaaaccccgtctctaataaaaatacaaaaattagctggacatggtggcacgtgcctgtaatcccagctactcaggaggctgaggcaggagaattgcgtgaacccgggcccggtggaggctgcagtgagacgagatcgcgccactgcactccagcctggcgacagagcgagacgccgtctcaaaaaaaaaaaaagaaa

SEQ ID NO: 3803 - DNA, 160 bp, Homo sapiens
  source 1..160: mol_type = other DNA
ctggcgtggtggctcacgcctgtaatgccagcactttgggaagctgaagcgggtggatcacctgaggtcaggagttcgagagcagcccggacaacatggcgaaaccccgtctctactaaaaatacaagttcgcgtggtggcgcgcgcctgtaatcccagc

SEQ ID NO: 3804 - DNA, 297 bp, Homo sapiens
  source 1..297: mol_type = other DNA
gccgggcgcggtggctcacgcctgtaatcccagcactttgggaggccaaggcgggcagaccatgaggtcaggagattgagaccatcctggccaacatggtgaaaccctgtctctactaaaaatacaaaaatgagctgggtgtggtggcgcgtgcctgtagtcccagctactcgagaggctaaggcaggaaaatcgcttgaacccaggaggcagagattgcagtgagccaagattgcaccagtgcactccagctgggcgacagagcgagactccatctcggaaaaaaaaaaaaaaaaa

SEQ ID NO: 3805 - DNA, 294 bp, Homo sapiens
  source 1..294: mol_type = other DNA
gccggtcgtggtggctcatgcctgtaatcccaacacttagggaggctgaggtgggcagatcacctgaggttgggagttcgagaccagcctgaccaacatggagaaatgccatctctactaaaaatacaaaaattagccgggcatggtggcacgtgcctgtaatcccagctactcaggaggctgaggcaggagaatcgcttgaacctgggaggtggaagttgcagtgagctgagatcacgccattgcactccagcctgggcaacaagcgaaactctgtctcaaaaaaaaagaaaa

SEQ ID NO: 3806 - DNA, 301 bp, Homo sapiens
  source 1..301: mol_type = other DNA
gctgggcacggtggctcacacctgtaatctcaacacttcaggaggctgaggcaggcagatcacttgaggtcaggagttcgagaccagcctgaccaacatggagaaattctgtccctactgaaaatacaaaattagccggatgtggtggtgcatgcctgtaatcccagctacttgggaggctgaggcaagagaattgcttgaacccagggaggcagaggttgcagtgagccgagatcacaccattgcactccaccttgggcaacaaaagcaaaactctgtctcaaaaaaaaaaaaaaaaaaa

SEQ ID NO: 3807 - DNA, 135 bp, Homo sapiens
  source 1..135: mol_type = other DNA
tttccactctgtccataaaatgggagctaatattctccaacctgtgtgcctgacatgatggttaaagggattaaacaaaacaatagtttgtaatttattctgtcagagcaaactgctggtaaataaaagggacta

SEQ ID NO: 3808 - DNA, 83 bp, Homo sapiens
  source 1..83: mol_type = other DNA
ggagactacaaggagatgatgagaggatgaagatgggcctggtttcatccgatccctgtcctaccgcctccctgttcttgcag

SEQ ID NO: 3809 - DNA, 202 bp, Homo sapiens
  source 1..202: mol_type = other DNA
gaaaatgaaattttgggagaagtggactatctgggttcaaatcctggttgactgtgatgttgggtaagttacttatctttgtacatcagtgtctttcatctgtgagaacacttgccttgtctcccaagtttgccataattaaatgggaaacacgtaaagcattcagcatagtgctggcactcagacgtttactagttcttag

SEQ ID NO: 3810 - DNA, 308 bp, Homo sapiens
  source 1..308: mol_type = other DNA
ggccaggcatggtggctcatacctgtaatcccagcactttgggaggcggaggcaggaggatcacctgaggttgggagttcaagaccagcctggccaacatggagaaaccccatctctactaaaaatacagaattagccggggtgatggcacatgcctgtaatcccagctactgaggaggctgaggtaggagcatcgcttgaaccctggaggtagaggttgtggtgagccaagatcgtgccgttgcactgcagtctgggcaacaagagagaaactctgtctcaaaaaaaagaaaaaaatagaaaaagaa

SEQ ID NO: 3811 - DNA, 331 bp, Homo sapiens
  source 1..331: mol_type = other DNA
gatgtgagggcgatctggctgcgacatctgtcaccccattgatcgccagggttgattcggctgatctggctggctaggcgggtgtccccttcctccctcaccgctccatgtgcgtccctcccgaagctgcgcgctcggtcgaagaggacgaccatccccgatagaggaggaccggtcttcggtcaagggtatacgagtagctgcgctcccctgctagaacctccaaacaagctctcaaggtccatttgtaggagaacgtagggtagtcaagcttccaagactccagacacatccaaatgaggcgctgcatgtggcagtctgcctttctttt

SEQ ID NO: 3812 - DNA, 1076 bp, Homo sapiens
  source 1..1076: mol_type = other DNA
ggtggctggcaagatggctgaataggaacagctccagtctgcagctcccagtgaaatcaatgcagaaggcgggtgatttctgcatttccaactgaggtacccagctcatctcattgggactggttagacagtgggtgcagcccacggagggcgagcagaagcagggtggggtgttgcctcacctcggaagcacaaggggtcggaaaacttccctgcctagccaagggaagctgtgagggactgtgccatgaggaatggtgcattctggcccagatactacacttttcctatggtcttcgcaactcacagaccaggagattccctcgggtgcctgcaccaccagggctctgggtttcaagcacaaaactgggtggccatttgggcggacaccaagctagctgcaggagtttttttttctatactgcagtggcacctggaacaccagtgagacagaaccattcactcccctggaaagggggctgaagccatggagctaagtggtctagctcagcagatccaacccctacggagcccagcaagctaggatccactggcttgaaattctcactgccagcacagcagtctgcagtcgacctgggatgcttgagcttggtgaggggaggggtgtccaccattactgaggcttgagtaggtggttttcccctcacagtgtaaacaaactgccagggaagttcgaactgggcagagcccaccgcagctcagtaaagctgctgtagccagactgcctctctagattcctcctctttgggcaggacatctctgaaaaggcagcagcaccagtcagggtcttatagataaaacccccatctccctgggacagagcacctgggggaaggggtggctgtgggagcagcttcagcagacttaaacatccctgcctgctggctctgaagagagcagcggatctcccagcacagtgctcaagctctgctaaggaacagactgccatctcaagtgggttcctgacgcctgtgcctcctgactggaagacacctcccagcaggggtcgacagacatctcatacaggagagctccagctggcatctagcagatgc

SEQ ID NO: 3813 - DNA, 106 bp, Homo sapiens
  source 1..106: mol_type = other DNA
gagaagaaagggcaccgtcgtgagagttttatttcccactttgtcactcacccaatgtgagtttgcaaaaatatctgtcctcctcgtttctccctttcctcatctg

SEQ ID NO: 3814 - DNA, 307 bp, Homo sapiens
  source 1..307: mol_type = other DNA
gctgggcacggtggctcatgcctgtaatcccagcactttgggaacccaaggcgggtggatcatgaggtcaggagttcaagaccagcttggccaacatggtgaaaccccgtctctactaaaaatagaaaaattagcccggcgtggtggcaggcggcaggcgcctgtaatcccagctactcggaaggctgaggcagtgaattacttgaacccaggaggcagaggttgcagtgagccgagatcacgccactgcactccagcctgggcaacagagatccgtctcaaaaaaaaaaaaaaaaaaaaaaaaaaa

SEQ ID NO: 3815 - DNA, 152 bp, Homo sapiens
  source 1..152: mol_type = other DNA
gccagttaacctaagattgactttcctcacctgcaaaatatggataacatccacttccctgatttttgtgagaatcaaatgggatgatttatgtaaagcatttagctcaatgcttaacacattaaaaacagcccccaaatggcagctattat

SEQ ID NO: 3816 - DNA, 456 bp, Homo sapiens
  source 1..456: mol_type = other DNA
gtggcaagcagaataatagttccccaaagatgtgcacatcctaatctcagaacccatgaatatgttaccctaagtggcaaatgggactttgcaaatacgattaagttaaggatcttgtgatggggagactagcctggattatccaggtggactcaatgtaatcaaaagggttatcaaaagagggaggtggggaatcagagtgacagaagatgggaagatgaagcagtggtggaagtgacatagccatgagccaaggaatgaagcccgtctctagaaacctgaaaatgcaaggaaatgaatgttccccaacaatgtccagaaggaacacaattttgctgatacctgtaaggtccattttgaactaatgacctccagaagtgtaaggtaataaatttgtgttgtttcagctactaagtttgtgattatttgttatagcaacaataggaaactaataca

SEQ ID NO: 3817 - DNA, 212 bp, Homo sapiens
  source 1..212: mol_type = other DNA
gtttttggctgaagttatattactctgaattttatgttgatcagcatatatctgactgacaatgcagtgtgtcttatacttactaaaaaggaaaatcaattattatttattatgtttagttcatttgggagatgacacactcttcaaatcattggagctatgaaggatggagcatgaggtggagtaaaaggggtgtttactatggaaaaggt

SEQ ID NO: 3818 - DNA, 73 bp, Homo sapiens
  source 1..73: mol_type = other DNA
tgaataacgcatgtatacacttagcactgggtctgaccctggatcatcattcaatcaatgtttgtccattttt

SEQ ID NO: 3819 - DNA, 473 bp, Homo sapiens
  source 1..473: mol_type = other DNA
ttatttaaagagaaaaggaggacattctacctctgagcatgatactgacagagacgggatttattctccactgtaaataactaaatatacagacacaaatttatgaaatcacagttttggggcaataaacaacacgcagcacaggggagtgtcatctctgagaaaagagaaatagacaaggtgagtcctactattaccctcagcttactgcctggagagtttccaggatatggtacaggaagaagaaaccagggaggggatgggacgcagggggaggcagcagttctccctcaggtgaagagacagttcatctgaggaggtcaagacaactagaatttgcagagcagagaaccaaaagagactgcacaaaagcaaatcccagagatctgcaaggggttgcattcttacctgagtaccatgtatatgtgtgtaaagaaactgtatgaagccaggtgaagaaccatcagaaagga

SEQ ID NO: 3820 - DNA, 311 bp, Homo sapiens
  source 1..311: mol_type = other DNA
gccgggcgcggtggctcacgcttgtaatcccagcactttgggaggccgaggcgggcggatcacgaggtcaggagatcgagaccatcctggctaacacggtgaaaccccgtctctactaaaaatacaaaaaaattagccgggcgtgatggcgggcgcctgtagtcccagctactcgggaggctgaggcaggagaatggcgtgaacccgggaggcggagcttgcagtgagccaagattgcgccactgcactcccgcctgggccacagagagagactccatctcaaaaaaaaaaaaagaaagaaaaaaagaaaa

SEQ ID NO: 3821 - DNA, 301 bp, Homo sapiens
  source 1..301: mol_type = other DNA
tggcttctccgggatcagtcacgttaccacactgtggaagctttgttctttcactctttgcaataaatcttgctgctgctcactctttgggtccacactgcctttatgagctgtaacactcactgtgaagtctgcagcttcactcctgaagccagcaagaccatgaaaccactgaacacatctgaacatcagaaggaacaaactccggacacaccacctctaagaactgtaacactcaccgcgagggtccgcagcttcattcttgaagtcagtgagaccaagaactcaccaattccagaca

SEQ ID NO: 3822 - DNA, 207 bp, Homo sapiens
  source 1..207: mol_type = other DNA
gtcctgggatgctccttcccggtccagtcggtgcgccggggcagcagctgcggggagaggacaccccgtgagcccggcccccggcccctacccgcccgctcccctcccccgcccgccccgcgccccggcggggaccccgagccccgcgccccgcgccctgccggcggcggcagcggcggcgcagcggcccagaggcggccgcgcggc

SEQ ID NO: 3823 - DNA, 225 bp, Homo sapiens
  source 1..225: mol_type = other DNA
tgatatagttgagaatgctggacttgagttcaaaagacctaggtctaggtcttggatctgtcagcattagctgtatggtcaagtcaaccctttttgagcttcagttttttcatctgacaggtgggaaaaacatctctctttcctaccaaaaataagttgtggatatcaaatgagacagtgtgcttaaaacttccttgtgaatgataaaattttatgtaaacataa

SEQ ID NO: 3824 - DNA, 6483 bp, Homo sapiens
  source 1..6483: mol_type = other DNA
tggcaagatggccaaataggtacagctccagtctgcagctcccagcgagatcaatgcagaaggcggtgatttctgcatttctaactgaagtacctggctcatctcgttgggattggttagacagtgggtgcagcccatagagggtgagctgaagcagggtggggcatcacctcacctgggaagcacaaggggtttgggcactctctcccctagccaagggaagccatgacggactgtgccatgagggacagtgcactcaggcccagatactacgctcttcccacagtctttgcaacctgcagaccggtagattccctcggatgcctacgccaccagggccctgggtttcaagcacaaaactaggtggccgtttgggcagacaccgagctagctgcaggagttttattttcatactccagaggcacctggaacaccagcaagacagaactgttcactcccctggaaaggcggctgaagccagggagccaagtggtctagatcagcaaatcccacccccatggagcccagcaaactaagatccactggcttgaaattctcactggcagtacagcagtctgaagtcaacctgggatgctggagcttggtggggggaggggcgtctgccattaccaaggcgtgagtaggtggttttcccctcccagtgtaaacaaagcctccaggaagttccaactgggcagaccccacctcagctccacaaactgctgtagccggactgcctctctagattcctcctccctgggcagggtgtctgaaagaaaggcagcagccccagtcatgggcttatagataaaactcccatctccctgggacagagtacctgggggaaggggcagctataggcacaacttcagcagacttaaacgttcctgcctactactggctctgaagagagcagcggatctccagcacagcactccagctctgctaagggacagatggcctcctcaattgggtccctgaccccagtgcctactgactgggagagacctcccagcaggggtcaacagacacctcatacaggggagctctggctggcatctggtgggtgcccatctaggacaaagcttccggaggaagaacaggcagaaatctttgctgttctgtagcctctgctggtgatacccaggcaaacagggtctggactggacccccagcaaactccagcagagctgcagaagaggggcctgactgttagaaggaaaactaacaaacagaaaggaatagcatcaacatcaacaaaaggacagccactcagaaaccccatccgaaggtcaccaacatcaaagaccaaaggtagataaatgcacaaagatgaggaaaaaccagcccaaaagggctgaaaattccaaaagccagaatgcctcttctcctccaaaggatcacaactcctcatcagcaagggaacaaaactggatggagaatgagtttgaggaattgacagaagtaggcttcagaaggtgggtaataacaaactcctccgagctaaagaagcatgttctaacccaatgcgaatctgagaaccttgaaaaaaggttagaggaattgctaactagaataaccagtttagagaacatacatgacctgagaaagctgaaaaacacagcatgagaacttcgtgaagcatacacaaatatcaacagccgaatctatcaagcagaagaaaggatatcagagattgaagatcaacttaatgaaatgaagcctgaagacaagattagagaagaaagaatgaaaaggaactaatgaagcctccaagaaatatgggactatgtgaaaagaccaaacctatgtttgattggtgtacctgaaagtgacagggagaatggaaccaagatggaaaccctcttcaggatattatccaggaggacttccccaacctagcaagataggccaacaatcaaattcaggaattacagagaacatcacaaagacactcctcgagaagagcaaccccaagacatataatcatcagattcaccaaggctgaaatgaaggaaaaaatgttaagggcagccagagagaaaggtcgggttacccacaaagggaagcccatcagactaacagcagatctctttgcagaaaccctacaagccagaggagagattcaacattcttaaaggaaagaattttcaacccagaatttcatatccagccaactaagcttcataagcgaaggagaaataaaatcctttacagacaagcaaatgctgagagattttgtcaccaccagggctgccctaaaagagctcctgaaggaagcaccaaatacggaaggaaaaaaccagtatcaaccactgcaaaaacataccaaattgtaaagaccatcgacactatgaagaaactgcatcaactaatgggcaaaataaccagctagcatcataatgacagaatcaaattcatacacaacaatattaaccttaaatgtaaatgggctaaatgccccaaataaaagacacagactggcaaattggataaagagtcaagacccatcagtgtgctgtattcaggagacccagctcctatgtgtgtgcaaagacacacataggctcaaaataaagggatgatttaccaagcaaatggaaagcaaaaaaaaaaaaaaaaaaaaaaaccaggggttgcaatcctagtctctgataaaacagactttaaaccaacaaagatcaaaagagacaaagaagggcattacataatggtaaagggatcaatgcaacaagaagaggtaactatcttaaatatatatgcacccaatacaggagcacccagattcataaagtaagttcttagaggcctacaaagagacttagactcccacacaataatagtgggagacttttaacaccccactgtcaatattagacagatcaacgagacaggaaattgacaaggatattcaggacatgaactcaaactgtggaccaagcagacctaatagacatctacagaactctccaagcaaaatcaacataatgtacgttcttctcagcaccacatcacacttattctaaaattgagcacataattggaagtaaaacactcctcagcaaatgcaaaagaacagaaatcataacagtctctcagaccacagtgcaatcaaattagaactcaggattaagaaactcactcaaaaaccgcacaactacatggaaactgaacaacctgctcctgaatgactactggcagaaataaagaagttaattaaggaagaaataaataatgaaataatgaaattaaggcagaaataaagaagttatttgaaaccaatgagaacaaagacacaacgtaccagaatctttgggacacagctacagcagtgtttagagggaaatttatagcactaaatgcacacaggagaaagcgggaaagatcttaaatcaacaccctaacatcacaattaaaagaaacagagaagtaagagcaaacaaattcaaaagctagcagaagacaagaagtaactaagaccagagcagaactgaaggagagagagagagacacaaaaaaaaaacccttcaaaaaaagtcagtgaatccaggagctggttttttgaaaatattaacaaaatagatagaccactagccagactaataaagaagaaaagtgagaagaatcaaatagacacaataaaaaaatgaaaaaggagatatcaccaccaatcccacagaaatacaaactaccatcagagaatactataaacacctctatgcaaataaactagaaaatctagaagaaatggataaattcctcgacacatacactctcccaagactaaaccaggaagaagtcaaatccctgaatagaccaataataagttctgaaactgaggcagtaattaatagcctaccaaccaaaaacagcccaggaccggacagattcacagctgaattctaccaaaggtacaaagaggagctggtaccattccttctgaaactattccaaacaacagaaaaagaggggctccaacctaactcattttatgaggccagcatcatcctgataccaaaaactggcagagacacaacaaaaaaagagaatttcagggccaatatccctgatgaacacagatgcaaaaatccccaataaaatactggcaaaccaaatccagcagcacatcaaaaaacttatccaccacgatcaagtcggattagtccctgggatgcaaggctggttcaacatacgcaaatcaataaatgtaatccatcacataaacagaaccaatgacaaaaaccacatgattatctcaataaatgcagaaaaggccttcgataaaattcaacacctcttcatgctaaaacctctcaatagactaggtactgatggaacttatctcaaaataataagagctatttatgacaaacccacagccaatatcatactacacgggcaaaagctggaagcattccctttgaaaaccagcacaaggcaaggatgccctctcttaccattcctattcaacatagtattgaagttctggacagggcaatcaggcaagagaaagaaataaagtgtattcaaataagaagactggaagtcaaattgtttctgtctgcagatgacatgattgcatatttagaaaactccaccgtctcagccccaaatcaacttaagctgataagcaacttcagcaaagtctcaggatacaaaatcgatgcacaaaaatcacaagcattctcatacaccagtaacagacaaacagagagccaagtcatgagtgaattcccattcacaattgctacaaagagaataaaatacctaggaatacaacttacaagggatgtgaatgacctcttcaaggagaactacaaaccactgctcaaggaaataagagaggacacaaacaaatgggaaaatattccatgctcacagataggaagaatcaatatcgtgaaaatggccatatagcccaaagtaatttatagattcaatgctatccccatcaaactaccattgactttcttcacagaattggaaaaaactactttacatttcatatggaaccaaaaatgagcccatatagccaagacaatcctaagcaaaaagaacaaagctggaggcatcatgctacctgacctcaaaactacactacaaggctacagtaaccaaaacagcatggtactggtaccaaaacagatatatagaccaatggaacagaacagaggcctcagaaaaaacgccacacatctacaaccatctgatctttgacaaacctgacaaaaacaagaaatggggaaaggattccctatttaacaaatggtgttgggaaaactggctagcaatatgcagaaaactgaaactggacccattccttatacaaaaattaactcaagatgaattaaagacttaaacataagacctaaacccataaaaaccctgtaagaaaacctaggcaataccattcaggacataggcataggcaaagacttcatgactaaaacaccaaaagcaatggaaataaaagccaaaattgacaagtgggatctaattaaactaaagagcttgtgcacagcaaaagaaattatcatcagaatgaagaggaaatctagagaatggagaaaatttttacaatctatccgtctgacaaagggctaatatccagaatctacaagtaacttaaatttacaagaaaaaacaaccccatcaaaaagtgggcaaaggatatgaacagacacttctcaaaagaagacatgtatgcagccaagaaacatatgaaaaaatgctcatcatcactggtcattagagaaatgcaaatcaaaaccacaatgagataccatctcatgccagttacaatggtgatcattaaaaagtcaggaaacaacagatgctggagaggatatggagaaataggaacgcttttacactgttggtgggagtgtaaattagttccatcattgtggaagacagtgtggcgattcctcaaggatctggaaccataaataccatttgacccagccatcccattactgggtatataaccaaaggagtataaatcattctactaaaagacacatgcacatgtatgtttattgcagcactattcacaatagcaaagacttggaaccaacccaaatgcccatcaacgatagactggataaagaaaatgtggcacatagacaccatggaatactatgcagccataaaaaaggatgagttcatgtccttttcagggacatggatgaagctgaaaaccatcattctcagcaaactagcacagaaacagaaaaccaaacactgcatcttcaactcataagtgggagttgaacaatgagaacacatggacacagggaggggaacatcacacatggggtcctgttgggggttgggggctatgggagggatagcattaggagaaatacctaatgtagatgacgggttgatgggtgcaacaaaccaccatggcacatgtgtgtaacacatctatgtaacaaacctacatgttctgcacatgtatcccagaacttaaagcataat

SEQ ID NO: 3825 - DNA, 339 bp, Homo sapiens
  source 1..339: mol_type = other DNA
attatttggcactaaaaagaaacgaaggacttatatatactaaacatggataaaccttgaaaacgttaagtgaaagaagccggtcacaaaagatcacatgatgattccattcatacgaaatgtccagaataggcagaaagattagtggttgcctaggctggctgtagatggaatggagtaactgctaatgggtgtagggttccttttcagggtgatgaaaatatcctacagttagcttgtggtgtaggctgcacaactcttgaatatattcaaatccactgaactgtacattttaaatgtaaggtatgaattgtatctcaataaagctgttattaaaaa

SEQ ID NO: 3826 - DNA, 198 bp, Homo sapiens
  source 1..198: mol_type = other DNA
caaccctgagattcacattcactagaatggctgtaattaaaaagagaaataataataagtcttggtgaagatgtacagaaattacagaaccctcatacattgctggtgggaatgtaaaatggtgtagccacttcagaaaacagacggtcagttcctcaaaagatgaaacagctgctgtatgagttagcacttctaccc

SEQ ID NO: 3827 - DNA, 299 bp, Homo sapiens
  source 1..299: mol_type = other DNA
ggtcgggtgtagtggctcatgcttgtaatcccagtactttaggaggctgtggtaggtggatcacttgaggtcaggagttcaagaccagcctggccagcatggtgaaacctcatctctactaaaaatacaaaaattagcttggtgtggtggtgcattgcctgtagtcccagctacttgggaggctgaggcaggagaatcacttgaacccaggaagtggaggttgcagtgagctgaggtcgtgccactgcacttcagcctgggtgacagagtgagacagtctctaaaaaaaaaaaaaaaaa

SEQ ID NO: 3828 - DNA, 142 bp, Homo sapiens
  source 1..142: mol_type = other DNA
cttaacactgaaaaacataccctgcattttgaaaatgtttatggatgtctcagcagttcttaaaagaagaaaaaaaccactaacaaatggccagtagatgctggacacaatcattagggaagtgtaaatcaaaactactatg

SEQ ID NO: 3829 - DNA, 2558 bp, Homo sapiens
  source 1..2558: mol_type = other DNA
ttcaacaacatgtacatcattcagacagaaaattagtaagaaatgcaggacttgaattgcatttttggccaaatggacccaatagacatgtacagaattttccatccaacagcagcagaatgtaaagtttttctagagtatacatagaacattctccaggatagaccatatgttaggccacaaaatttaagattgaaattatgtctagtatcatttcagatataacttcaaaccacagtggtataaactagacatcagtgacaggaggaatcttgaaaaattcacaaatatctggaacataaacaacatgccccagaacaaccaatgggtcaaagaagaaattaaaagataaatttaaaaaatgccttgagacaaatgacaacggaaacacaatataccagaactgatgggatataggagaagcagttctgagaggaaagtttatagcaatatatgcctacattagaaaagaagaaagatctcaaatgaatagtgtgacattacacctcaaggaactagaaaaagaacaaactaaaaccagattagtagaaggaaagaaataaaaatcagaacaaacataaactaaatggataatagaaaagccacaggaagaatcaataaacttaagagttgggtttttttttaagtaaaattggcaaacccatagatagtctaacaaagaaaaaagaaaactcaagtaaaaccaaaaatgaaattgaagaaattacaacagacacctcgggaataaaaaggatgataagtccctattacgaacaattatatgccaacaaattgggtggcctagaggaaacagataaattcctaggaaaatacaacctaccaggattgactcaggaagaaatagaaagcctgtaacagaccaatcacaaatagattggagaagtaatgaaaaacctctcaacaaagacaagcccaggaacagatagcttcacagctgagttctaccagacattcaaagaattgataccagtacttcttaaactcttccaaaaaaatagaactagaaggaatactttcaaacacattttatgaggccaggatcaccctgatacccagccagccaaagacatcacaagaaaagaaaatttaaacccaatttctctgatgaatattggtgcaaaaagccccagtaaaatattaggaaaccaaatccaacaacacatcaaaaagattacatgtcatgactaagtgggatttatccctggcatacaaagctggtttaacatctgcagatcaatcagtagtgatacattgcattaacagaatgaaagataaaaatcacatgataatcttaattgacacagaaaaagcatttgacaaagtccaacatcctttattgagaaaaatgctcaatagtgtatgtatagaaggaaagcttctctgtgtaataaaggccatttatgaaaaacccacagctaacattataatacatgggggaaaactgaaagtttttccatgaaggtctagtatcaggcaggcatggatgcccactttcaccacttctattcaacatagtactggaagtaccagcaatagtaattagataaggaaaagaaattaaaggcattgaggtcaggaagaagtaaagttatctctatttgcagatggtgtgatcctatattgtagggggggaaaaaagcccctgcagattccacacaaaaaaactgttagaacaacgaatgaattcagtaaagctgtggggtgcaaaatcaacatgcaaaatcagttgcgttttttttcataccaattacagtctgtttgaaaagaacatgaagaaaatggtcccacttaacaaagcatcaaaaagaacaaaatacctaggaataaattcaaccaatgtgaaagatgtgtacactgaaaactataaaacattaatgaaagaaattaagcacaaaaaaatggaaagatatcacatgctcatggatcagaagaattaatattgttgaaatgtccatagtacccaaagcaatatacagattcggtgcaatctctatcaaaattccagtgaccttcttcacagaaatagaaaaaatgcttcttaaatttgtacagaaccatgaaagaccctgaatagccaaaacaattatgaaaaagcaaaacaaagttggaggtattatacttcctgatttaaaaattatattacaaagttatagtaataaagacagtattatacaggcataaaaacagacacatagaccagtggaacagaatagagagtccagaaataaatccacgtatatatagtcaactaatttttgacaagggcaccaagaagacacaatgggaaaagaatagtctctttgataggatgttaagaaaactggatttccacatgcaaaagaatggaattggactgttatcgtataccacatacaaaaatcaactcaaaattgataaaagacctaaacataaaagcagaaactataaaactcctacacaggaacataggggaatagctcctggacattggcgttggtagtcagcttttggatatcacaacaagagctcaggccacaaaagcaaaattaaataaatgg

SEQ ID NO: 3830 - DNA, 3635 bp, Homo sapiens
  source 1..3635: mol_type = other DNA
gaacaggtgttggtttccatgactgagagacccatagatggttcacatcacaggactctgtgcagacaacccccagtaccagcctggagcctggtagacttgctaggttgctagatccagaacagagataacaatcactacagctcagctctcagaaagcaacatgcacaggaaaaagggaagagtactacatcagggcaacatcctatgggacaaaacaatctgaaaaacagccttcagccctagaccttccttctgacagagcctgcccaaagaagaaggaaccagaaaaccaattctggtaatatgacaaaacaaggttatttaccacgcccgaaaaatcacactagctcaccaacaacggatccaaatgaagaagaaatccctgatttacctgaaaaagaattcgggaggttagttattaagctaattagggaggcaccagggaaaagtgaagcccagtgtaaggaaatcaaaaaatggtacaaaaggtgaagggaggaatattcaacgaaattgatagcataaataaaaagtaataaaaacttcaggaaacaatggacacacttatagaaatgcaaaatgctctggaaagcctcagcaatagaattgaacaagtagaagaaaggaattcagagctcgaagacaaggtctttgaattaacccaatccaacaaagacaaagaaaaaagaataagaaaatatgaacaaagactccaagaagtctgggattatgttaaacaacgaaacctaagaataatggggattcctgaagaagaagagagatctacaagtttggaaaacatatttgggggaataattgaggaaaacttccctagccacgctagagacctagacatccaaatataaaaaggacaaagaacatctgggaaattcatcacaaaaagataattgcctagggacattgtcatcaggttatctaaagttaagatgaaggaaagaatcttacttaagagctgtgagacagaagcaccaggtaacctataaaggaaaacctaacagattaacagcagatttctcagaagaaactgtacaagttagaagggactggggccctatcttcagcctcctcaaacaaaacaattataagccaagagttttttatccagtgaaactaagcttcatatatgaaggaaagatacagtcattttcagacaaacaaatgctgagagaatttgccactaccaagccaccactacaagaactgctaaaaggagctctaaatcttgaaacaaattgtggaaacacatcaaaacgcaacctctttaaagcataaatctcacaggacctataaaacaaaaataaaatttaaaaaaacaaaaacaaaaagctaaaagttaagggatacatgcaataaatagcacaatgaatgcaatggtacctcacatctcaatactaacattgaatgtaaatgactcaatctccacttaaaagatacagaattggagaattataaaaattcttgctaccttcaagagactcacctaacacataaggactcacataaacttaaggtaaaggggtgaaaaagacatttcacacaaatgaatatcaaaagtgagtatgagtagctattcttatatcagacaaaataaactttaaagcaacagcagttaaaaaagaccaagagggacattatatagtgaaaaaaggccttgtttgacaggaacatatgacaatcataaatatatatacacctaagactggcgcttccaaatttataaaacaattactaatagacctaagaaatgagatagaagcaacacgataattgtgggggacttcaatactccactgacagcactagacttgtcattaagacagaaagtcaacaaggaaacaatgaatttataccatggaacaaatgaacttaacagatatatacagaacattccatccaacaactgcagaatgtacattctattcaacagcatatgaaacttcctccaagatagaccatatgataggccacaaaatgagcccaataaatttaagaaaattgaaatgatatcaaacagtctttcagaccatagtggaataaaactggaaatcaactctaaacctttaaaatcatgtaaatatcatagacattaagtagtcttctcctgaatgatcattgtagtcaaaatgaaatcagcatagaaattacaaaattcttcaaactgaacgacaatagtgacacaagctatcaaaacctcatggatacagcaaaggcagtgagaagtggaaagctcatagccctaaacacctacatcaaaaagtctgaaagagcacaaacaaataatctaaggccacacttcaaggaactagagaagcaagaacaaaccaaacccaaacccagcagaagaaaggaaataaccaagatcagagcagaactaaatgaaattgaaacaaaaagaaaattatgaaagataaatgaaacaaaaagctagttctttaagaagatatataaaattgatagaccattagcaatattaatcaagaaaagaagaaaatccaaataagctcaataagaaacaaaatggaagatactacaactgacagcacacaaagatcattcaaggctgctatgaacacctttacacacataaactagaaaacttagaatagatggataaattcctggaaaggtgcaacccttctagcttaaatcaggaagaattagataccctgaacagaccaataacaagcagcaagattgaaatggcaattaaaaaattaccagcaaaaaaagtccaggaccagacagattcacagcagaattctaccagacattcaaagaagaattggtaccaatcctattgacactattccacaagatagagaagaaggaatcctccctaaatcattctctgaagtcagtatcaccctaataccaaaactggtaaaaaacataaccaaacaagaaatctgcagaacaatatccctgatgaacatagatactaaaatccttaacaaaatactagctaactgaatccaacaacgtatcacaatgataatccaccatgatcaaataggtttcatatcaggaatgcagggatggtttagcacatgcaagtcgataaatgtgatacaccacataaacagaattgaaaacaaaaatcacatgattatctcaatagaagcagaaaagcatttgacaaaatccagcatccctttatgattaaaactctcagcaaagttggtatatgagggacatacctcaatataatgaaagccacctatgacaaatttatagccaacataataccgaatggggaaaagttgaaagcattccctctgagaactggaacaagacaaggatgtccactttcaccattctgcttcaacatagtactagaagtcctagccagagcaatcagacaagagaaagaaataaagggcatccaaatcagcaaagaggaagtcaaactgttgctctttgctgatgatatgatcatttatgtagaaaaccctaaagactcttccagaaagctcctagaactgataaaataattcagcaaagtttctggatacaaaattaatgtacacaaatcagcagctcttttatccaccaatagcgactaagctgagaatcaaattaagaacacaaccccttttacaatagctgccgga

SEQ ID NO: 3831 - DNA, 2093 bp, Homo sapiens
  source 1..2093: mol_type = other DNA
ttccccttgagaactgaaacaagacaaggaagcctactctcaccacttctattcaacaaaatactggagtgctagccagagcaattaggcaagagaaagatataaaagcatccaaatagaaaaaaaaaaaagtcaaattatctcttttcatggacgatacaattctatatttagaaaaccctaaatactctgccagaaggctcctggaactggtaaaggactttagcaaagcttcaggataaaaatcaatgtacataaatcagtagcatttagtagcatttctatataccaataacactgaagctgagagccaaatcaagaatacaatcccatttacaatagccacaaaaaagtaaaatacctaggaatacatttaaccaaggagatgaaagatctgtataaggagaactacaaagcactgccaaaagaaatcatatacgacacaaacaaatggaaaaacattccatgctcacagacaggaagaatcaatgctgttaaaatggtcaataatgcccaaagcaatctacaaattcaataccattcctatcaaaccaacatcatttttcacagaattggcaataactattctaaaaataatatgaaaccaaaaaagagccaaatagccaaagcaatcctaagcaaaaagaaaaaagccagaggcatcacattacctgaattcaaagtataatataaggttacagtaaccaaaacagtatggtactgatacaaaaacagacacataggccaatgaaacagaataaagatcctggaaataaagccacacacctacagtaatctaatctttgacaaaatggacaaaaataagcaagggggaaaggactgtctattcaataaatgatgctgggataacaggctagtcatatgtagaagaataaagctggttccctacctttaaccatagaaaaaattaactcaagatggattgaatatttacatgtaagacatcaaactataagaatcctagaagaaaacccaggaaacatcattctgaacattagccttgggaaagaatttatgactaagtcctcaaaagcaattgtaacaaaaacaaaaattgacaaatggagcctaattaaactagacagcttccgcacagtaagagaaactatcaacagaataaacatacaacctacagaatgggggaaaacatctgcaaactacaaatctgacaaaagcctaatgtccagatctataaggaatttaaactattgaaaaagcaaaaaataaataaccctgttaaaaaaaagtgggcaaaagacatgaacagacacttctcaaaagaagacatataagtggtcaacaaacttattaaaaatgctcctcatcactaatcattaaagaaatgcaaatcaaaaccacaatgagataccatctcacactagtcagaatagctattattaaaaactcagaatacaacagatgttggcaagtttgcaatgaaaagggaatgctatacactcctggtgggaatgtaaattagctcagccattgtgggaagcagtttggcaatttctcaaagaacttaaaacaactatcatttaacccagcaattccattactgggtatatatccaaaagaaaacaaatcattctaccaaaaagatacatgcatttgcatgttcatcgcagcaccattcacaatagcacagacatggaatcaacctagtgcccatcaatggtggattggatgaagaaaatgtggtacatatacacaatggaatattacgtagctacagaaaagaataaaatcatgtcctttgcagcagcatggatgcagctggaggccattatcctaagcaaattaacccaggaacagaaaaccaaatactgcttgttctcacttacaagtgggagttaaacattggatactcataaagatgggagcagtagacaccggggactactagatgaggaagggagaaaatggggtaagtgttgaaaaactgttggggacttttctcagtatctgtgtgatgggatcatttataactcaaacctcagcatcatgcatatacccaggtaacaaactgcacatgtacagcatgaatctaaaataaaagttgaaaaagaaaa

SEQ ID NO: 3832 - DNA, 1698 bp, Homo sapiens
  source 1..1698: mol_type = other DNA
aaaaatggaaaacttttcctcttagatcaaaaacaagactaaagtgcccactctcaccactttcattcaatatagtattgtaagttttagccagagcatttaagcaagaaaaagaagtaaaaggattcaaattggaaaggaagaaataaaattgtctctgtttgcatgtggcatgatcttacatatagaaaaccccaaagactacatcaaaaaacttttagaactaatacatgaattcaataaagttatagaatataaaccaacatacaaaaaatcagtagcatttctatacactaacaaaaaataatctgagaaagaaatgaagaaatcaatcccatttataatagcaaccaaaaaataaaatatttaggaataaacttaatcaaggaggtgaaagatgtacagtgaaaactataaaacattgatgaaagaaattgaagacacaaataaattgaaatatatcctgtgttcatggattggaagaattgatatttgttaaaatgtccatatgaccccaaatgattgacagattcaatgcaatccctatcaaaattccaatgatatttttcaaagaaatagaaaaaaaaattctaaaattcgtatggaaccacaaaagagcctgaatagctaaagtaatcttgagcagaaacaacaaagctagaggcatcacactacctgatttcaaagtatgttgctaagcttaagtaatcaaaacagtatagtactggcataaaaacagacacatagaccaatagaacagaatggagagcctatatgtaaatccatgcatttacagtcaattgatctttcacaaaggtgccaagaacacacaatggggaaaggatagtctcttcaataaattatgttgggacaactgtatatccacccatagaaaaatgaaattggacctgtatctcacgatatatacaaacatcaactcaaaatggattaaagaattaaatgtaagacctgaaactgtaaaactactagaagaacaaatagtgtgaaagttccttgacattggtctggagaatgatttttttggatttgaccataacactcaggcaggaaagcaaaaacaggcaaatgggattgcatcaaacttaaaaagctttccacagcaaaggaaacaatcaacagagtcaacagaaaatatcggcaaaccatacctctgataaagggttaatatccaaattatatacgaaactcaattcagtagcaagaaaacagcctatttttttaatggtcagaggacctgaatagacatttctcaaaagaagacatataaatggtcaacatgtgtatgaaaaaaagctcaacatcattaatcatcagagaaaatgcaaattaaagccacaaggagataccacctcacacctgttagaatggttactataaaaaagagaaaaaataagttttggagaggatgtgaagaaacgagaacccttgtccattattggtgggaaattaaattagtacagctattatgggaaacagtatggagtctcttcaaaaaactaaagaaatagaactaccctatgatccagcaattccacttctagatatatattcaaaggaaataaaatcagtatgtcaaagagataattgcactcccatgttcattgttgcattatttacaacagccaagatatggaatcaatctaagtgtccatcaatggatcaatggataaaggaata

SEQ ID NO: 3833 - DNA, 239 bp, Homo sapiens
  source 1..239: mol_type = other DNA
tcgagaccagcctgggcaacatagcaaggccctgtctctacaaaaaaaaaaaaaaaaaaaaccttaaaacttagtcaggcatagaggcgcatgcctgtagtcccagctacttgggaggctgaggtgggaggattgcttgagcctaggggattgagactgcaatgagctgtgatcacgccactgcactccagcctgggtgacagaatgagtccctcatttaaaacaaacaaacaaaaaaa

SEQ ID NO: 3834 - DNA, 277 bp, Homo sapiens
  source 1..277: mol_type = other DNA
ggccaggcacagtgactcacacctgtaatcccagcactttagaaggccgaggcaggcagctcacttgaggccaggagttcgagaccagcctggccaatatggtgaaaacctgtctctactaaaaatacaaaaattagccgggcatggtagtgcacgcctgtaatctcagctactcaggaggctaaggcacaagtatcgcttgaacctgggaggcagaggctacagtgagccaaaatcaccccactgcactccatcctgggcaacagcaagactctgt

SEQ ID NO: 3835 - DNA, 291 bp, Homo sapiens
  source 1..291: mol_type = other DNA
ccaggcgcagtggctcatgcctataatcccggcactttgggagtctgtggcaggaggattgcttgaggccaggagtttgagaccagcctgggcaacatagcgagaccccatctctacaaaagattaaaaattagctgcgtgtagtagcatatgcctttcaacgtagctactcaggaggctgaggtgggaggatcccttgagccgaggagtttgagtctgcagtgagctatgatcgcaccactgcattccagaccccatctcgaaaaaaaaaaaaaaaaaaaaaaacagaaa

SEQ ID NO: 3836 - DNA, 148 bp, Homo sapiens
  source 1..148: mol_type = other DNA
tgggcagagagacgggtggaagcaggtgccccagatggtcccgcaggcgtcaccgtctggtttggagaccttaagggagttgtgcttcaaacttctctcccagggtctcaggtggagactagggagtttgacctaaaggtcctccaag

SEQ ID NO: 3837 - DNA, 126 bp, Homo sapiens
  source 1..126: mol_type = other DNA
aaatggagagttccacgaaggtgggaatttctgtctttttcatttatgctgtctatggtcagcagctagaacagcagtgcacacacagcaggtgctcagccagtcggtatttgttgggtgaatcaa

SEQ ID NO: 3838 - DNA, 383 bp, Homo sapiens
  source 1..383: mol_type = other DNA
gacatggttcagctctgtatccacacccaaatctcatgtcaaattgtaattcccagtgttgtgggagggacctggtgggaggtgattggctcatgggggccgacttcccccttgctgttctcgtgatattgagtgagcgcttgtgggatctggttgtttaaaagcgtgcagccctcccacttcactctctctgtctctcctgctccaacatggccagacgtgcctgcttccccttcgccttctgccgtgattgtcagtttcctgaggcctccccagccacgcttcctgtacagcctgcagaactgtgagtcaattaaacctcttttcttcataaattacccagtttctcatagttctttatagcagtgtgaaaacagactaat

SEQ ID NO: 3839 - DNA, 300 bp, Homo sapiens
  source 1..300: mol_type = other DNA
gctgggcgcagtggcttgtgcctgtaatcccaacattttgggaaaccaattcaggtggatcattagaggtcaggggttcaagaccatcctggccaacatggtgacatcccatctctactaaaaatacaataagttagctgggtttggtgttgggtgcctgtaatcccagctactcgagaggctgaggcaggataatcgcttgaacctgggaggaggaggtggcagtgagctgagatcgtgccattgcactccagcgtgggcaacaagagtgaaacgtcgtctcaaaaaataaaaaaaaaa

SEQ ID NO: 3840 - DNA, 300 bp, Homo sapiens
  source 1..300: mol_type = other DNA
cgggcgtgatggctcacacctgtaatcccagcactttgagaggccaagacgggtggatcacgaggtcaggagttcaagaccagcctggcctagatggtgaaaccctgtctctactaaaaatacaaatattagctgggcatggtggcatgcacctgtaatctcagctactcagaagtctgatgcaggagaattgctaaaacccaggagggggaggttatattgagctgagattgcaccactgcactctagcctgggcgacagagcaagactccatctcgaaagaaagaaagagaaaggaaa

SEQ ID NO: 3841 - DNA, 266 bp, Homo sapiens
  source 1..266: mol_type = other DNA
agggagacatgttttgtagatggcaggagcttcatgaaaagaagccaatgaagggcaggacgtgtagctgtctacctacaggaaaccagccaggagcctccccacagggacttcagcacagatggccgggaaaatctgcattcacctgagctctggacctaagagaggacaaggccttgaccatttctacagactcacaagatgcaatctctgtggtccatgcccgtggtgtgatctgggaagcagggggccttctaaatgccaac

SEQ ID NO: 3842 - DNA, 339 bp, Homo sapiens
  source 1..339: mol_type = other DNA
ggccaggcgcagtggctcccgcctgagatcccagcacgttgggaggctgaggcaagaggattgcttgaactcaggactttgaggctgcagtgagctatgactacaccactgcactccagcctgggtgacagagcaaaaccctgtctcaaaagaaaaaccaaggctgggcacagtagctcatgcatgtaatcccagctactcgggaggctgagacaggagaatcgcttaaacccgggaggcagaggttgcagtgagccaagatcaggccactgcattccagcctggcccacagagcaagactctgtctcaaaataaattaataaataaataaaaataaaa

SEQ ID NO: 3843 - DNA, 300 bp, Homo sapiens
  source 1..300: mol_type = other DNA
ggccgggtgtggtagctcatgcctgtaatcccattactttgggaggctgagatgggtggatcacttgaggtcagttgttcgagaccaaccagaccaatatagcgaaacctcatttatactaacaatacaaaaattagccaggcatgcttgttatcccagctactcaggaggctgagacaggataatcgcttgaacccaggtggaagaggttgctttgagccaagatagcgccactgcattccattctgggtgagagagtgagacgctgtctcaaaaaaaaaaaaaaaaaaaaaggaagga

SEQ ID NO: 3844 - DNA, 155 bp, Homo sapiens
  source 1..155: mol_type = other DNA
gccaggtgcagtggctcacgcctgagatgctagcacgttgggaggctgaggcaagaggattgcttgaactcaggactttgaggctgcagtgagctatgactgcaccactgcactccagcctgggtgacagagcaaaaccctgtgtcaaaagaaaa

SEQ ID NO: 3845 - DNA, 122 bp, Homo sapiens
  source 1..122: mol_type = other DNA
cccggcgcaggggcatgcgcctagaatcccagctactcggaaggccaaggcaggaggaccgcttgagtccagggattcaaggccaacctgggcaatagagcgagaccctgtctcttaaaaaa

SEQ ID NO: 3846 - DNA, 306 bp, Homo sapiens
  source 1..306: mol_type = other DNA
gccgggcgcagtgactcacgcctgtaatcccagcactttgggaggcctaggtgggcggatcacttgaggtcaggagttcgagaccagcctggccaacatggtgaaaccctgtctctactaaaaaaatacagaaaattagctgggcgtggtggcgggcgcctgtagccccagctacttgggaggctgaggcgggagaatggcaatggcgtgaacccgggaggcagagcttgcagtgagctgagatggcgccactgcactccagcctgggcgacagagccagactccatctcaaaaaaaaaaaaaaaa

SEQ ID NO: 3847 - DNA, 163 bp, Homo sapiens
  source 1..163: mol_type = other DNA
tagccgggcgtgatggcgggcacctgtagtcccagctactcaggaggctgaggcaagagaatcacttgaacccaggaggcagaggttgcagtgagctgagatcacgccattgcactacagcctgggcaacaagagcgaaactttgtctaaaaaaaaaaaaaaa

SEQ ID NO: 3848 - DNA, 306 bp, Homo sapiens
  source 1..306: mol_type = other DNA
gccgggtgcaatggctcgcgcccgtaatcttagcactctgggaggccgaggcaggcagatcacttgagatcaggactttaagaccagcctcggcaacaacatggtgaaaccatctctagcaaaaatacaaaaaattagccgggtatggtggcgggtacctgtaatcccagctactcaggaggctgaggcaagagaatcgcttgaacgcaggaggcagaggttgcagtgagctgagatcgtgccactgcactccagcctggacaacagagcaaaactctgtctcaaaaaataataaataaaaataaa

SEQ ID NO: 3849 - DNA, 300 bp, Homo sapiens
  source 1..300: mol_type = other DNA
accaggtgtggtggctcacatctgtaatcccagcactttgggaggcagaggtgggcggatcgcctgagatcaggagttcgagaccagcctggcccacatggtgaaaccctgtctctactaaaaatacaaaaattagccgggcgtagtgacacacgcctgtaatcccagctgctcgggaggcagaggcaggagaatggcgtgaacccgggaggcggaggttgcagtgagccgagatcacgccactgcactccagcctgggtaacagagcaagactctgtctcaaaaaaaaaaaaaaaagaa

SEQ ID NO: 3850 - DNA, 294 bp, Homo sapiens
  source 1..294: mol_type = other DNA
ggccgggcacagtggctcacacctgtaatcctaacactttgggaggctgaggtgggcggatcacttgatgccaggagttcgagaccagcctggccaacacggtgaaaacccgtctctacaaaaactacaaaaattagccgggtgtggtgactcacagccgtaatcccagctactcgggaggctaaggtgggagaattgcttgaacctgggaggcggaggttgcagtgagccaagatcacgccactgcactccagcctcggtgacagagcaagactgttttgaaaaaaaaaaaaa

SEQ ID NO: 3851 - DNA, 295 bp, Homo sapiens
  source 1..295: mol_type = other DNA
cagacttgatggctcacgcctgtaatcccagcattttgggaggccgagtcgggcggatcacaaggtcaagagacggaggccatcctggccaacatggtgaaaccccatctctactaaaaatacaaaaatgagctgggcatggtggcgtgtgcctgtagtcccagctactcaggaggctgaagcaggaaaatcgcttgaacccgtgaggcagaggttgcagtgagccaagatcgcgccagcctggcgacagagtgagactccgtctcaaaaaaaaaaaaaaaaatagtaaagaaaa

SEQ ID NO: 3852 - DNA, 159 bp, Homo sapiens
  source 1..159: mol_type = other DNA
ccaggtgcagtggctcatgcctgagatgctagcacgttgggaggctgaggcaagaggattgcttgaactcaggactttgaggctgcagtgagctatgactgcaccactgcactccagcctgggtgacagagcaaaaccctgtgtcaaaagaaaaacgaa

SEQ ID NO: 3853 - DNA, 301 bp, Homo sapiens
  source 1..301: mol_type = other DNA
gccaggtgtggtagctcatgcctgtaatcccattactttgggaggctgagatgggtggatcacttgaggtcagttgttcgagaccaaccagaccaatatagcgaaacctcatttatactaacaatacaaaaattagccaggcatgcctgttatcccagctactcaggaggctgagacaggataatcgcttgaacccaggtggaagaggttgctttgagccaagatagcgccactgcattccattctgggtgagagagtgagacgctgtctcaaaaaaaaaaaaaaaaaaaaaaaaaaaaga

SEQ ID NO: 3854 - DNA, 339 bp, Homo sapiens
  source 1..339: mol_type = other DNA
gccaggcgcagtggctcccgcctgagatcccagcacgttgggaggctgaggcaagaggattgcttgaactcaggactttgaggctgcagtgagctatgactacaccactgcactccagcctgggtgacagagcaaaaccctgtctcaaaagaaaaaccaaggctgggcacagtagctcatgcatgtaatcccagctactcgggaggctgagacaggagaatcgcttaaacccgggaggcagaggttgcagtgagccaagatcaggccactgcattccagcctggcccacagagcaagactctgtctcaaaataaattaataaataaataaaaataaaaa

SEQ ID NO: 3855 - DNA, 309 bp, Homo sapiens
  source 1..309: mol_type = other DNA
ggctgggcgcggtggctcacgcctgtaatcctagcactttgggaggccaaggcgggcagatcacgaggtcaggagatcgagaccatcctggctaagacagtgaaatcccgtctctactaaaaattcaaaaaattagccaggcatggtggcgggcgcctgtagtcccagctactcgggaggctgaggcaggagaatggcgtgaacccaggaggcagagcttgcattgagccaagatcacgccaccgcactccagcctgggtgacagagcgagactccatcccccccaaaaagaaaaaagacaaaaaaaaa

SEQ ID NO: 3856 - DNA, 214 bp, Homo sapiens
  source 1..214: mol_type = other DNA
tgcttttctgcattctgtgaattgttttagtgagttatcgaacttgagggcatggtgggaacctccaaatttgcagccagttggtgagaagtacatgtggtctgaggacacccaagcctgcaggtgtgtctaaagcgagggcagcctagtggggactggtggccttaacctgtggcatttgaggtaacatcagggagttgacatcagaattgca

SEQ ID NO: 3857 - DNA, 210 bp, Homo sapiens
  source 1..210: mol_type = other DNA
ccgggcatggtggctatgcctataatcccagcattttgggatgccaaggcgggtggatcacctgaggtcaggagttcaagaccagcctgaccaacatggcgaaaccccgtctctaatacaaatacaaaaattagccaagcatggtggtcactgtactccagcctgggtgacagagcaagactccgtctcaaaaaaaaaaaagagaaagaa

SEQ ID NO: 3858 - DNA, 302 bp, Homo sapiens
  source 1..302: mol_type = other DNA
cagccaggagcctccccacagggacttcagcacagatggccgggaaaatctgcattcacctgagctctggacctaagagaggacaaggccttgaccatttctacagactcacaagatgcaatctctgtggtccatgcccgtggtgtgatctgggaagcagggggccttctaaatgccaacaacaaggaaatcaaatgtgcaacaaacagaaataacggcattgacgtgggccatggaaaggcctaaacagatgactgcagttcactgccaaggtcatcaaaggggtgactctgaaataataa

SEQ ID NO: 3859 - DNA, 277 bp, Homo sapiens
  source 1..277: mol_type = other DNA
ccgggcttgatggctcacacctgtaatcccagcactttgggaggccaagacgggtggatcacgaggtcaggagttcaagaccagcctggcctagatggtgaaaccctgtctctactaaaactacaaatattagctgggcatggtggcatgcacctgtaatctcagctactcagaagtctgatgcaggagaattgctaaaacccaggagggagaggttgcagtgagccgagattgcaccactgcactctagcctgggcgacagagcaagactccgtct

SEQ ID NO: 3860 - DNA, 298 bp, Homo sapiens
  source 1..298: mol_type = other DNA
ggctgggcgcagtggcttgtgcctgtaatcccaacattttgggaaaccaattcaggtggatcgttagaggtcaggggttcaagaccatcctggccaacatggtgacatcccatctctactaaaaatacaataagttagctgggtttggtgttgggtgcctgtaatcccagctactcgagaggctgaggcaggataatcgcttgaacctgggaggaggaggtggcagtgagctgagatcgtgccattgcactccagcgtgggcaacaagagtgaaacgtcgtctcaaaaaataaaaaaa

SEQ ID NO: 3861 - DNA, 116 bp, Homo sapiens
  source 1..116: mol_type = other DNA
aagactggtaaatggatgtcaacgtgatgcctatggctcctggtggatttagatacctcctggtgcttattgatatctttaccagttgcacaggggcttttccatgccagactgaa

SEQ ID NO: 3862 - DNA, 126 bp, Homo sapiens
  source 1..126: mol_type = other DNA
ctatttactagcagaacactgaggggactgtgcggtcaccaatacctcctattgcacttggataaacacctcccaggaaatagagatgaatagaaaggacatagtcaaacaagcagaatggctgca

SEQ ID NO: 3863 - DNA, 383 bp, Homo sapiens
  source 1..383: mol_type = other DNA
tgacatggttcagctctgtatccacacccaaatgtcatgtcaaattgtaattcccagtgttgtgggagggacctggtgggaggtgattggctcatgggggccgacttcccccttgctgttctcgtgatattgagtgagcgcttgtgggatctggttgtttaaaagcgtgcagccctcccacttcactctctctgtctctcctgctccaacatggccagacgtgcctgcttccccttcgccttctgccgtgattgtcagtttcctgaggcctccccagccacgcttcctgtacagcctgcagaactgtgagtcaattaaacctcttttcttcataaattacccagtttctcatagttctttatagcagtgtgaaaacagactaa

SEQ ID NO: 3864 - DNA, 233 bp, Homo sapiens
  source 1..233: mol_type = other DNA
aagccgaggcagggtgatcacgaggtcaggagttcaagaccagcctggcaaacatggtgaagccctgtttctactaaaaatacaaaaattagctaggcatggtggcatgtgctgtagtcccagctactcgggaggctgaggcaggagaatcgcttgaacccgggaggcggaggttgcagtgagccgagattgtgccactgcactccagcctaggtaacagagcaggactccat

SEQ ID NO: 3865 - DNA, 297 bp, Homo sapiens
  source 1..297: mol_type = other DNA
ccagacttgatggctcacgcctgtaatcccagcattttgggaggccgagtcgggcggatcacaaggtcaagagatggaggccatcctggccaacatggtgaaaccccatctctactaaaaatacaaaaatgagctgggcatggtggcgtgtgcctgtagtcccagctactcaggaggctgaagcaggaaaatcgcttgaacccgtgaggcagaggttgcagtgagccaagatcgcgccagcctggcgacagagtgagactccgtctcaaaaaaaaaaaaaaaaaaatagtaaagaaa

SEQ ID NO: 3866 - DNA, 155 bp, Homo sapiens
  source 1..155: mol_type = other DNA
ccaggtgcagtggctcacgcctgagatgctagcacgttgggaggctgaggcaagaggattgcttgaactcaggactttgaggctgcagtgagctatgactgcaccactgcactccagcctgggtgacagagcaaaaccctgtgtcaaaagaaaaa

SEQ ID NO: 3867 - DNA, 301 bp, Homo sapiens
  source 1..301: mol_type = other DNA
gccgggtgtggtagctcatgcctgtaatcccattactttgggaggctgagatgggtggatcacttgaggtcagttgttcgagaccaaccagaccaatatagcgaaacctcatttatactaacaatacaaaaattagccaggcatgcttgttatcccagctactcaggaggctgagacaggataatcgcttgaacccaggtggaagaggttgctttgagccaagatagcgccactgcattccattctgggtgagagagtgagacgctgtctcaaaaaaaaaaaaaaaaaaaaaaggaaggaa

SEQ ID NO: 3868 - DNA, 319 bp, Homo sapiens
  source 1..319: mol_type = other DNA
gcagggtgcagtggctcacacctgtaatcccagcactttgggaggccaggcaggcagatcacttgaggccaggagttggagaccagcctggccaacatggtgaaaccctgtctcttctagaagcacaaaaatgagctgggcgttctggtgggcacctgtaatcccagctacttgggaggcttaggcaggagaatcactggaacccgggaggcagaggttgcagtgagccaagatcgcaccactacactccagcctaggccacaaagcaagactgtttctcaacaacaacaacgacaacaacgaaaaaaaaaaaaaaaaa

SEQ ID NO: 3869 - DNA, 339 bp, Homo sapiens; identical to SEQ ID NO: 3854
  source 1..339: mol_type = other DNA

SEQ ID NO: 3870 - DNA, 310 bp, Homo sapiens
  source 1..310: mol_type = other DNA
ggctgggcgcggtggctcacgcctgtaatcctagcactttgggaggccaaggcgggcagatcacgaggtcaggagatcgagaccatcctggctaagacagtgaaatcccgtctctactaaaaattcaaaaaattagccaggcatggtggcgggcgcctgtagtcccagctactcgggaggctgaggcaggagaatggcgtgaacccaggaggcagagcttgcattgagccaagatcacgccaccgcactccagcctgggtgacagagcgagactccatccccccccaaaaagaaaaaagacaaaaaaaaa

SEQ ID NO: 3871 - DNA, 214 bp, Homo sapiens; identical to SEQ ID NO: 3856
  source 1..214: mol_type = other DNA

SEQ ID NO: 3872 - DNA, 211 bp, Homo sapiens
  source 1..211: mol_type = other DNA
ccgggcatggtggctatgcctataatcccagcattttgggatgccaaggcgggtggatcacctgaggtcaggagttcaagaccagcctggccaacatggcgaaaccccgtctctaatacaaatacaaaaattagccaagcatggtggtcactgtactccagcctgggtgacagagcaagactccgtctcaaaaaaaaaaaaagagaaagaa

SEQ ID NO: 3873 - DNA, 382 bp, Homo sapiens
  source 1..382: mol_type = other DNA
acatgttttgtagatggcaggagcttcatgaaaagaagccaatgaagggcaggacgtgtagctgtctacctacaggaaaccagccaggagcctccccacagggacttcagcacagatggccgggaaaatctgcattcacctgagctctggacctaagagaggacaaggccttgaccatttctacagactcacaagatgcaatctctgtggtccatgcccgtggtgtgatctgggaagcagggggccttctaaatgccaacaacaaggaaatcaaatgtgcaacaaacagaaataacggcattgacgtgggccatggaaaggcctaaacagatgactgcagttcactgccaaggtcatcaaaggggtgactctgaaataataa

SEQ ID NO: 3874 - DNA, 298 bp, Homo sapiens
  source 1..298: mol_type = other DNA
ccgggcttgatggctcacacctgtaatcccagcactttgggaggccaagacgggtggatcacgaggtcaggagttcaagaccagcctggcctagatggtgaaaccctgtctctactaaaactacaaatattagctgggcatggtggcatgcacctgtaatctcagctactcagaagtctgatgcaggagaattgctaaaacccaggagggagaggttgcagtgagccgagattgcaccactgcactctagcctgggcgacagagcaagactccgtctcgaaagaaagaaagaaaggaa

SEQ ID NO: 3875 - DNA, 299 bp, Homo sapiens
  source 1..299: mol_type = other DNA
ggctgggcgcagtggcttgtgcctgtaatcccaacattttgggaaaccaattcaggtggatcgttagaggtcaggggttcaagaccatcctggccgacatggtgacatcccatctctactaaaaatacaataagttagctgggtttggtgttgggtgcctgtaatcccagctactcgagaggctgaggcaggataatcgcttgaacctgggaggaggaggtggcagtgagctgagatcgtgccattgcactccagcgtgggcaacaagagtgaaacgtcgtctcaaaaaataaaaaaaa

SEQ ID NO: 3876 - DNA, 157 bp, Homo sapiens
  source 1..157: mol_type = other DNA
aattcagaagaatcttgccagggaagactggtaaatggacgtcaacgtgatgcctatggctcctggtggatttagatacctcctggtgcttattgatatctttaccagttgcacaggggcttttccatgccagactgaaaacgcagaagatcaatga

SEQ ID NO: 3877 - DNA, 138 bp, Homo sapiens
  source 1..138: mol_type = other DNA
atcaaccttcaactatttactagcagaacactgaggggactgtgcggtcaccaatacctcctattgcacttggataaacacctcccaggaaatagagatgaatagaaaggacatagtcaaacaagcagaatggctgca

SEQ ID NO: 3878 - DNA, 383 bp, Homo sapiens
  source 1..383: mol_type = other DNA
tgacatggttcagctctgtatccacacccaaatctcatgtcaaattgtaattcccagtgttgtgggagggacctggtgggaggtgattggctcatgggggccgacttcccccttgctgttctcgtgatattgagtgagcgcttgtgggatctggttgtttaaaagcgtgcagccctcccacttcactctctctgtctctcctgctccaacatggccagacgtgcctgcttccccttcgccttctgccgtgattgtcagtttcctgaggcctccccagccacgcttcctgtacagcctgcagaactgtgagtcaattaaacctcttttcttcataaattacccagtttctcatagttctttatagcagtgtgaaaacagactaa

SEQ ID NO: 3879 - DNA, 233 bp, Homo sapiens; identical to SEQ ID NO: 3864
  source 1..233: mol_type = other DNA

SEQ ID NO: 3880 - DNA, 296 bp, Homo sapiens
  source 1..296: mol_type = other DNA
ctgggcgcggtggctcttgcctgtaatcccagcactttgggaggctgaggcgggcagatcacctgagatcgggagtttgagaccaagcctgaccaatatggagaaaccctgtctctactaagaacacaaaattagctgggcatggtggtgcatgcctgtaatcccagctacttgggaggccgaggcaggagaattgcttgaacccgggaggcagaggttgcagtgagctgagatagcgccattgcactccagcctgggcaacaagagcaaaactctgtctcaaaaaaaaaaaaaaa

SEQ ID NO: 3881 - DNA, 1314 bp, Homo sapiens
  source 1..1314: mol_type = other DNA
tccctgacctaagcctttgcagagaatgaggggagacccataaaaggataaagaagaaaaggaaagacaggggtcaaaattggaaataaaataacccaagaaagagaaaagtccatcctatgtgtaaaaagagctctgggagattggtaaatgggagtacagagcattaggcagtccctaagagtgagtagggacaaaaacaccgatgttagaaagccatcatttctggaaagaaaggaggataaaaaggggagtgcaagaaggaaaaagtatccagcaggaaaaatgagaacccaaaccaaaagactatccatcactactgccatcaagcacaaaaaaagaagaaagttattcattgaaaaaaatcacactatgctacattttcagaagaggtttgcacctggactagaaaacacaaaataattaatagatgaaaaaatgcctatataaatatccaaagcttctttaagaagataacaaacatgaaagtcaaatatttcagctaatgaaatccacaccactgaatgataaaatctcgcaaaacagaagaaaataatgcagaattaaaagttgaactaaatatcctcaaatgagcattcagaaatattaaaaaagcaatttaaacaagaaattcaaaaaccaagaatagaaatggggaaaaaagcagaaagaaataaagagtttattagacatagaaaggaaatggaagaaaaggagaatactatcaaaaaaaataaaaacaatcacaagatgataaaaagaaaaattcaaataatgaaggaattgaagtaaaggcactaaaacaatgatgaagaatgaaaatgataccagagaaagaagtgagaagtatcagagaaagtggtagaaatggaagaaaggcacataattataaccggagtgcctgaaaaagaaaaccacagcaatgaatcaaaactagtgtttaaattataatccaagaaaactttccagaaataaaagaagacctgaatcgacatttggaaaggatccagggggtactggaaaaaattaatctggtatggtaaactaactcaagacatctttcagtagaactatgaaaaatgaagaaaaattcctcagaacctccaggcacaaaagtcacataatttataagggacagaagaatttggctagcatcagacttgttaaaagaaacatacaaaccaaagcagtggtgtagatgcatttttaagaaactttaaaaattgagaaccaaggactttatatctggccaatctgtcattcaagtatagacgttattttaaaaagtttcaaatatgcaacaattgaggaaat

SEQ ID NO: 3882 - DNA, 171 bp, Homo sapiens
  source 1..171: mol_type = other DNA
gctgggtatggtggcacgtgcctgtaatcccagctgctcaggaggctgaggcatgataattgcttgaacctgggaggtggaggttgcagtgagcccaagattacactgctgtactccagcctgggcaacagagggaggctctgtctcaaaaaaaaaaaaaaaaaaaaaaaa

SEQ ID NO: 3883 - DNA, 167 bp, Homo sapiens
  source 1..167: mol_type = other DNA
ttctctaagcatgatctacagacaaccagcagcacaattacctgtagtgcaagatgttacttttcacagctctacttaaatgtaatgaaccagaatgtttaaagattgagcttagaaatctacattttaataaacaccttcaattttatgttcactgaagtttacga

SEQ ID NO: 3884 - DNA, 195 bp, Homo sapiens
  source 1..195: mol_type = other DNA
agcggatcagtcgactcggccaggtgcggcctgaggagaagcctcccggtctccgccccggcccgcccctcgcctccccagccgccccactccgtttccgccccagagtctcagccagcagctcaaccgccgccgctccgccccgccccgccccacggccgcccgggcccgcctccgagcccggccagcgcgcca

SEQ ID NO: 3885 - DNA, 1082 bp, Homo sapiens
  source 1..1082: mol_type = other DNA
tgaggcgtacacttaaatatccatctgcagctaataggaaaatttttgaaaggccttacaaatttgctacagggattaatagaacttgtgaaaatcaaaagttcagtaattgaaattaacaatcagattagacagctataaaggcaccaatgacttggaaggcaagtcagaagaaattcagaatgcaacacaaagcaaatggaatgaaagttaagcaacatgaaacacaaggcctcacatatgtctaatcagaacaatggaagaagaggaaagagaacatggagtggaggctatattttaagagagaagggttcaggatttacctgaactgatgagaagcaacaatctaaagattaaagctcaatgaatcccaagcaagatgatttaaatccagacacattatggtgaaactgcaaatcacaagtaacaaagaaagtatcctaaaagcagccagagggaaaaaagatcgtaacctaaggaaggagactgaccactcaactctcaacagcagcactgggagccagaagacagcgcaatgtcccgaaaggaaataactgccaacagagaaccctgttcccctaaaactcagaaagaggacgaaataaagactcagaccaccacaacctgaaagttcaacactagcatgctgtcactaaaggggattctaaaggatgaaagaataaagagcagtcaaagtagtaagtatgtatgggcaaactaaaacattgtgaaccaacgtcttatggattcaagttaaacgatatttaaaatatataagaatagcatatattagaagcagggtaaattgaattaaaagtgttctgagacatatcaattgtcaggaggaagttaaagtgattaattttactccattgtgctagtagacatagaaatgaagtatgttactttcaaactaacaggaaaaggtggtggaatggttaaaatatttcaaaataaaatgacaggcaaaaaaacaacaggtgggacaaataccaaaacaataaagataatgatacataaattctgtatacctaatgtgaatgatccacatattcccccccacacacacataaaatcagtta

SEQ ID NO: 3886 - DNA, 194 bp, Homo sapiens
  source 1..194: mol_type = other DNA
cagcggttggccaactatagcccaaaggccaaatttggacttctttttataaatgcagattgtctatggctgctttcccactactccagcctaaggtaaacagctgcaatagaagccaaatgagaatcgcaaagcccaaaatgtttattaacctgccctttacacaaaattacacaaaaagtttcctgatctct

SEQ ID NO: 3887 - DNA, 295 bp, Homo sapiens
  source 1..295: mol_type = other DNA
agatggtcacaaacatacaatggttcaacttaacaacggtgcaaaagtgattcgcattcagtggaacatcaataaattacttgagatattcaacactttactataaaataggttttgtgttagatgactgctcaactgtaggctactaagtgttctgagcacctgtagggtaagggaggctaaactacgaggtctagtaggttaggtataataaatgcattttccacttaacgttttcaacttaaaaatgggtttattgagacacaaccccatgctaagttgagaggaacatctg

SEQ ID NO: 3888 - DNA, 270 bp, Homo sapiens
  source 1..270: mol_type = other DNA
gccaggcgcaatggctcacgcctgtaatcccagcactttgggaggccgaggcaggcagatcacctgaggtcagcagttcgagaccagcctggctaacatggtgaaaccctatttctactaaaaatccaaaaagtagccgggcgtggtggcacacgcccgtaatcccagctacccgagaagcagaggttgcagtgagctgagattgtgccactgcactccagcttgggcaacaagagcaaaactccatctcaaaaaaaaaaaagagaaaaa

SEQ ID NO: 3889 - DNA, 304 bp, Homo sapiens
  source 1..304: mol_type = other DNA
gctgggaatggtggctcacacctgtaatctcagcactttaggaggcctgagtcaaggagttcgaggccaaacagttgagactgtttcccagactgggaaacagtgagacccccatctctacaaaacattaaaaaaaaaaaaaaaaaagagtcaggtgtggtggcacacacttgcagtcccagctcctcaggaggctgaggtgggaggaccacctgaccctgggaggttgaggctgcagtgagctgtgactgcaccactgcactaagcctgggtgacagactgagtccctgtcaaaaaaaaaaaa

SEQ ID NO: 3890 - DNA, 862 bp, Homo sapiens
  source 1..862: mol_type = other DNA
tatattcttaagtctgtagctgaaagggttcaccattctagatgccatttaagaacatcatgcttcatgggaggacgttaaaatgtcagcattaacaggagtttggaagaaattgattccaaccttcacagataactgagtcttgatttgacttcaagacttcagtggaggaagtaactacaaatgtggtagaaatagctagataactagaagtggtggagcctgaagatctgactgaattgctgcagtctcatgattaaacttgaacagatgaggatttgcttcatatgggtggatacagaaagtggtttcttgagatgaaatctactgctggcaaagatgctgtgaacatcgttgaaatgacaacaaaggacttcgaatatcagtaaaatcagttgataaaaccaaagcagggtttgagaggatgcactcccaattttgaaagaagttcttgtgtgggtgaacgctatcgtaccaaacagcatcgcaagctacagataaatctttcgtgatagagtcaattgacgtgacaaacttcattgttgtcattttaaggcattgccacagtcaccccaaaaccttcagcaaccctgatcagtcagcagccatcaacaacagggcaagaccctccaccaacaaaaagatgactcactgaaggctcaagtgaccattagcattatttagcaatgaagtatttttaattaaggtatgtatttttaagacataatgctattgcacacttaatagactacaatgtagtataaacataacttttatatgcaatgggaaatcaaaaaattcccgtgacttgctttattgcagtggtctggaagcaagcccacagtattttcaaagtatgcct

SEQ ID NO: 3891 - DNA, 1392 bp, Homo sapiens
  source 1..1392: mol_type = other DNA
caggcgtacctcattttattgtgctttgcaaacattgcatttttttacaaattgaaggttgtggccaccctgtgttgagcaagtctgttggtgctatttttccaacatgtattcacttcatgtctgtgtgacacatactggtaaattctcacaatatttcagactttgtcattatatctgttatggtgatctgtgattagtgatcttcgatgttactactgtgattgttttagggcaccacagggcacacccagataaggcagtgaacttaattgataaatactgtgtgtgttgtgactccttcaccagttacccattccctttctctgctcacttcaagtttccctatgccctgagacacaacagtatttaaattaggtcaattaataaccccacagtggcctctgagtattcaagtgaatggaaaagtcacatccctctcattttaaatcaaaacctagacatgattaagtttagtgaggaaggcatgctgaaagctaaaataggcctcttaaggcaaacagtaggccaagttgtgaatgcaaaggaaaagttcttgaagaaaaatcaaagtgctactccactaagcatatgaataagaaagtgaaacagctttattgctgctagggagaaagtttgaatggtctgaatagaagatcaaagcaaccacaacatttccttaggctaaagcctaatccagagcaaggccctcgtttcaattctgtgaagcctaagagaggtgatgaagctgcagaagaaaaattggaagctagcagaggttggttcctgtggtttagggaaagaagccatctccatgagtgcagaatgaagcagcaagtgctgatgtagaagctgctgcaagttacccagaagatctagctaagatcattgatgcaggtgactaaacagattgtcagtgtagaggaaacagccttccattggaagaaggtgccgtctaggactttcataactagagagaagacaacatctgctttgaaaggacatgctaactctcattagtggataatgcagctggtcacttttaagtggaagctagtgctcatttatcattctgataatcctaggacccttagaatttgctgaatctactctgcctgtgctttataaatggaacaacaaagcctggatgacagcatgtctgtttacatcatagtgtactgagtattttaagcccactgttgggaccgactgctcaggaaaaaaaaaaaaaaaaaagattgtttcgaaatatcattgcagatggcatctgagatctgatggagatgtacaaagaggttaatgttgtttttcatgcctgctaacacaacgtccgttcgacagcctatccatcaaagagtaatttcagatgctattatttaggaaatatattct

SEQ ID NO: 3892 - DNA, 229 bp, Homo sapiens
  source 1..229: mol_type = other DNA
ggtgtggtcaagtagcaaggctgcagccaaaagacctacactggatatctgactccttatctttcatgttgtgtgaccttgagcaagttactttaacctttttaagcctctgtttttttcttctataacagagacagtaatatttatcactgtttttttttgtagagattaaatggcgtatcttatgtaaatcacctaaaatatttttctagtagtaggcatcaaataa

SEQ ID NO: 3893 - DNA, 84 bp, Homo sapiens
  source 1..84: mol_type = other DNA
gtcttggtatccttctgtgctattactgtgtgacctcaggcaaatctattactctctctgggctgcaactctaaaataaagggg

SEQ ID NO: 3894 - DNA, 217 bp, Homo sapiens
  source 1..217: mol_type = other DNA
caggttgagcatcccaaatccaaaatgctccaaaatctgaaactttttgctcaaaggaaatgctcattggagcatttcagatttcagaactggatttcagatttcagaactggggatgcttaactgataagtataatgcacatattccaaaatctgaaaaaatttgaaattcagaatacttctggtcccaagcatttcaaataagcgatacccaatc

SEQ ID NO: 3895 - DNA, 248 bp, Homo sapiens
  source 1..248: mol_type = other DNA
cagcgtagtatagcaaaaagaggattggactgaaagttgggaaacctgggtgaccttccggctgacatagtgggtggccttgggcaagtcacttatctctctgttcttcatttcttccatccaaccaaacaaaaggaggagctaaagttttacatctccaacatgacaaggtcattgatgataaatgagctactatctaaataactttaaaataagagaactctataaatttagaggtttaccactat

SEQ ID NO: 3896 - DNA, 72 bp, Homo sapiens
  source 1..72: mol_type = other DNA
tcattcttgtgctttcatcacaatgcttgatacaagataagcatgcaataaatatttactcagagaatgaat

SEQ ID NO: 3897 - DNA, 308 bp, Homo sapiens
  source 1..308: mol_type = other DNA
ccgggcgcggtggctcacgcctgtaatcccagcactttgggaggccgaggcaggcggatcacgaggtcaggagatcgagaccatcctgactaaaacggtgaaaccccgtctctactaaaaatacaaaaaattagccgggcgtagtggcgggcgcctgtagtcccagctacttgggaggctgaggcaggagaatggcgtgaacctgggaggcggagcttgcagtgagccgagatcccgccactgcactccagcctgggcgacagagcgagactccgtctcaaaaaaaaaaaaaaaaaaaaaaaaaaaaa

SEQ ID NO: 3898 - DNA, 155 bp, Homo sapiens
  source 1..155: mol_type = other DNA
ctgctgtgtgcattccagatatagtacatagctcagctctcaaatcagcaacaaagaagataagcacaccaggtccacatagcagagaacttcacattatcaagtttctatccaaagcttcaaagaagcaaataatattttgaaagactatgtga

SEQ ID NO: 3899 - DNA, 134 bp, Homo sapiens
  source 1..134: mol_type = other DNA
caatactagtcaaaatgcagtccacggaccaatgctggttcatgccctatttgatccaagtccacattaagtacagaaatgaagagtaagcatttagaaacttggggcaatttgacattgcctcaacatccaag

SEQ ID NO: 3900 - DNA, 447 bp, Homo sapiens
  source 1..447: mol_type = other DNA
tttaaagaagttgttcgtttactcctcgaggtagtctcagatctaattttctcttggattaatatgacaactaatacttgaagcactttagcttactactagagaattctatctactgagttatgctttatgtacttagcttttatcaaatatataagtatttgataaaatactcacgtaagttacaggaaacacttccgcatatgttgtataatcaaggtcactgtctactttgtaattcagtgactattaagttcccaatgagaaaatgaaagaattgctgggttcctactttctgataagaacagttccttgatttccccttttttcttggttgtcaggaagctccacagaaaagtctgtctaatcacagcaaccgtaataattatcatggcttagaaattcacttcttcattctaagatcataattttctattttcattttat

SEQ ID NO: 3901 - DNA, 434 bp, Homo sapiens
  source 1..434: mol_type = other DNA
atatggcctttgcagctcttctcatcaagagatggaatctcctttcttatcccttgagtctgtgctgtccttatgattcgcttttgacgaacagaatgtggagaaagtcatgtgtgactcccaagccccagtttcaagaggttttgcagcttctactctcattctcttagaaccccaagactaccatgctctgaagaaacctcttctggagtgagacccggtagtcccagctatctgacctgaggccccagacatgggaatgaggccattaaaggatgtccagccctggctgaaccctcagctaaatgcagatgcctaagtctaagcaagagcagcagacgaccatccagtcaaccacagaatcaggagaaataatagttgctttaagccattaagttttggggtagtttgttacacaatagaaaatcagtaca

SEQ ID NO: 3902 - DNA, 131 bp, Homo sapiens
  source 1..131: mol_type = other DNA
gaactgagattacagtttagaatttgttactaataaagctatataatctcctataatttacttaacctttccaggcttcaatttcctcatctataaaatgacagactaaataatctttaaggtttcttcta

SEQ ID NO: 3903 - DNA, 144 bp, Homo sapiens
  source 1..144: mol_type = other DNA
tcctagtttggactcaaaagcagcggggagaccctggactagtcacttgccatctctcggtctcagattctgtttgtaaaatggggttagaccagattatctctagagaacctttagttccccaagattttctgatcatataat

SEQ ID NO: 3904 - DNA, 304 bp, Homo sapiens
  source 1..304: mol_type = other DNA
gccggggatggtggctcacacctgtaatcccagcactttgggaggccaaggtgggcagatcacttgaagtcaggagtttgagaccagcctggccaacacagtaaaaccccatctctactaaaaatacaaaaattagccaggtgtggtggtgcgtgcctgtagtcccagctactaaggaggctaaggcaggagaatagcttgaacctaggaagcagaggttgcagtgagccgagattgtgccactgcactccagcctgggtgacagagtgacactttctctcaaaaaacacaaaacaaaaacaaa

SEQ ID NO: 3905 - DNA, 137 bp, Homo sapiens
  source 1..137: mol_type = other DNA
tttcttatccgtaaatgaggataaaagtcgagtacccacttatatgatgtttgtgaggacaaaatgagttaagacatacgaaccacttacaataatgctggcctagaataggtaatcaatacattttagttataatt

SEQ ID NO: 3906 - DNA, 297 bp, Homo sapiens
  source 1..297: mol_type = other DNA
gccaggcgtggtggctcatgtctgtaatcccagcattttgggaggccaaggcgggcgggtcgcttgagagctcaaaagtttgagaccagcctggtcaacatggtgagaccctgtcactataaaaaagtagccaggcatggtggtgcgagcctgtggtcccagttacttgagaggctgagcaggaaggatctctggagcctgggaggcagaggttgcagtgagccaagattgcaccactgcactccagcctgggtgactgagtgagaccctgtctaaaaacaaaacaaaacaaaaaaa

SEQ ID NO: 3907 - DNA, 297 bp, Homo sapiens
  source 1..297: mol_type = other DNA
gccaggagtggtggctcacgcctgtaatcacagcactttggtgggccgagacaggtggatcacctgaggtcgagagttcaagaccagcctgaccaacatggagaaagcccgtcttcactaaaaacacaaaattagttgggtgtggtggtgcatgcctgtaatcccatctactcgggaggcagaggcaggagaattgcctgaaaccaggaggcggaggttgcgctgagttgagatcatgccattgcactccagcctggccaacaagagcgaaactcggtttccaaaaaaaaaaaaaaa

SEQ ID NO: 3908 - DNA, 745 bp, Homo sapiens
  source 1..745: mol_type = other DNA
acttaacatttaaaattgagcacttcatttccctaccatttgatagccttccccatctctataaatggcactcttattaatgcagttgctcaaccaaaaatgtgggaggtattaattcttctccctcattatcatcttccacatccaatttatcggcgtagttcccctttacctccaaaaacactgggcaaattctcccatctaacctaatagcccctaactcctgcactctttggtcaccctataatccattcttatccaccactaggctaatccttttaaaaggtgaatcatgtcatattcaccccagcttaaaacataatggcttcccattgcacttggtataaaatccaggctccttggggtagtctgtaagccttacatgatctcatttctgcctacctctgaccttatcgtgttcttactgtccccaccccgcccccatacttttaagtacctaccacattggcctgccttctgttctgtcccttatgccaaagcatttcctgtctccttgtcatttaggtcttgctcacatgtcaccttctcaaagaagtcttcctggccccctctagcccatcattctcttacattttcatagcatctatcttgatctgaaattaatatattttttttcttccttcttcagcccttattagtcctttgaaaatagagaccatgtcattctatttactttctcatcctcagtgtctgaagtaggtacagagtatgtatttgtgaatga

SEQ ID NO: 3909 - DNA, 294 bp, Homo sapiens
  source 1..294: mol_type = other DNA
gccgggcacggtggctcatgcctgtaatcccagcactttgggaggccaagacgggtggatcacgaggtcgggagatggagaccatcctggctaacatggtgaaaccccgtctctactaaaaatacaaaaaactagccgggcgtggtggcacgcgcctgtagtcccagctactcaggagactgaggcaagagaatcgcttgaacctgggaggtggaggttgccgtgagctgagatcgtgccactgcactccagcctgggcaacagagcaacactccgtctcaaaaaaaaaacaaa

SEQ ID NO: 3910 - DNA, 186 bp, Homo sapiens
  source 1..186: mol_type = other DNA
cagtggtttccaaatttggctgcacattcataccaatcaccaggggatttttttaaaatcctgatgcccaacttgcactccacattaattaacatgtctaggagtgggagcctgacagacaccactattaaaaaaaaaaaaaatccccaaaatgattccaatagacaacaaagttgaggaaccact

SEQ ID NO: 3911 - DNA, 1521 bp, Homo sapiens
  source 1..1521: mol_type = other DNA
ggtgaagtcagcaagatggtagaagaagaacttcccggcttcattgcccacccacagaaaatccaactaacaattatccacagacaagaacatctttgtgaagacactaaaacttgggaatgagaatgaaaacacctacatggaacacagaaccatataaaaactgcattagaagagtaagaggcatggtttcaccttgaccatatcactcctcccactcctccaagtcagcacagagccacaggggggattctcctaagcccacgttttctacagaggaaaagagaactgaaagtagagatctagcttccctagcattctgagttgctttgaaggaagcccatgactgtcttgcctcaaagggaatactggagtaactgcagggcaagatcccctggtgtcaaacaaatcaagaaggtggagtttgcagtgactggtgtgcagatctgggtggtagctctgtgttgctgccagcagcggcacctgatcagagagatcagctaatgatctaccctacctacaaagctgagtcggctgctcccagaagctgaacaagaagttcaacctggcttgagtccctagaaaactagcctctatgcccagcctcagagcccaccccaaggccctacccaggaaaagagatgcccaccacagtgcattttttgaagagaacagtggctagacttgcccaaaccctgaaatccaaacagcagcgccaaacagtggctccacctagtgtcagagcccatcccatggtccagcccaggcaaggactatggagcataacctctggacttgtctagaacagtgatccatctaaacctagagcccagcctgccgacctacccaactgcataacccaaatagcaatactccccaacagggaaatacactttgtgacgctgccagatattagaagcaatcacagttcccagccagcagctccgcctgattgcagtggccagccagtagtcttgctggaaggtgaagctcagccagcagccgcatccaaactcagagcaaaggcagagacccagccaactagagaaactgacagcaagctctgcctccctggggttgatatcagctggctcatccagaatcacaggctaaagtaaataatgaagttaaatctatgctaaagaacacctctaaaggatggaagaggtggctgtctcctcaaatgcacagacatcaatacaaggacatgaagattatgaagaactagcggaatagtgacaccaccaaaagaaattaataaagctctaataatggaccctaaagagacggtcatctatggaatgaccaacaaaaaatacacaacaatcctcttaaggaagttcaggaaactacaagaatataaaaataaaaagttaaatgaaatctggaacacaatatatgaacaaaatgagaaatctgacagaaaaacagaaactataacaaaaaccaaatagaaatcctggaaatggagacaacaacaactgaactgaaaaattaaatagcaagttttaactgtagact

SEQ ID NO: 3912 - DNA, 1580 bp, Homo sapiens
  source 1..1580: mol_type = other DNA
aaagtctatttttcaaagaactcagtcctgtggtgattttttaacaaacatgaggactggagacagagaagttatgtttcaaaactcatcatatatttgtcattaaattctaaattcactagttgtttttaagttttcgcctacattttagactaaccttacttattcctgtaaatcaaacagcagtctccagctgcaactcagaaagaacaagagggatgggtaatgtaaaaatctggatcaattttctatttctgagctaaaatcctgcaaatcctgccaggtgatgggaataaataggatgcgcatcactcagaggtttccttttgggaaagtaagaccaagggagctaaccaaagccaagcaccacgcacccaaatcctggcaagcatgactatagctaccagttatctgggtgtgtcacaagacatcattttctctccctttttggaggaggactcaattacacagtttcaccttagcattcagcttaatgataaggagtccatgcaacccctccgagacacatttttgtcccaggctcaattccaagctttgggtcaaagccctaggaaagaaaactggacctgagggatccagaggcagatgacaacagaggttaaaaggcacagcgcaggtgagcgtggctcattcctgacaagccaaccccaaccttcctgtttcatggataaaggccaggttaatatccatggcataaatgaggtctagggaactccaagattactgacagtaggtgctagagagacataggtaagagtggataattcctattctctaggcccccctacctcaagggtgcaagctgcttttgcggtgcctgccaaggttgctggaacttgggggtgcaaggacagaagagggaaagaggacactcttccctctctccctcacgtaccccaggtatctggtaggaagagaagggaaccagggctgcctgttcctctctttctaaatgggcagccattcatcttcagtctgtacccctttctaatgcattctgaacccccgggaagccattaaaagatgccttcttttttctttcttctcatctgtcctctcttcactgataggtaactgtgcctctgtactaggggacactcccttcagatgcatcctccaaactgcaaagaatttctcaaactcactggcttagggttaagctcaggggaagagatcccagaagcccaacataccaccaaaaggataaagttttttttgccagtcaggcttttggcctccctctccctgtgcaaactggtagaaggcctcggaatttctgagctgtccttacccctccccttgtttcattttgatacatgtcttctaataagatggtttgtctgttcttgccttcaagccatcagactccaaatggtcacacaaccagagcctctgacgatggctccttctgctgggaacccttagattggcctctaggaagctctgactgccatttcccccaaaatagcgccccctgtcagcaagaggcagttaagatcagtcttcatctttacccttccatctaatggcagttagatgtacttctttagaggggggaa

SEQ ID NO: 3913 - DNA, 466 bp, Homo sapiens
  source 1..466: mol_type = other DNA
ttccatatgagatgcacaaagctggacagaacatagctcacactgtaactacaaaaaagaacaagggaaaaacaaatgatctacaaatagaaacttcttgaactcatcagagtgctgcagttactgggaaactaaccaatccaaattctaatgaaaggcaggacacatgggacgtgagcacttgagtacctggggaagacaatactagacaccagtaagaataattcagtcaaaaccgttaatgaattgctaaaggctaagtgtgtgttcacaagaaaatatagaagccagaggatctacagacacaaagggaattcatacccattcatggacttttgcaaagatctcaccagatgttcacaggcatacacaaaaagactgagtgtatggtgaaaggcctgacaaagcatttctcatggtgcaggcttgagggaagcatgaagccactgagggaaagcatgaagtc

SEQ ID NO: 3914 - DNA, 108 bp, Homo sapiens
  source 1..108: mol_type = other DNA
atagaaaatgcacagctttaaaatgggcagagttaaaatctattcccagctttatcacttatttagccatgctagcctaggcctctatttccttgtctccaaaatgag

SEQ ID NO: 3915 - DNA, 78 bp, Homo sapiens
  source 1..78: mol_type = other DNA
taggcctctatttccttgtctccaaaatgagaataataaaatttaggtcaggattactatataaactaagataataca

SEQ ID NO: 3916 - DNA, 167 bp, Homo sapiens
  source 1..167: mol_type = other DNA
gtgtataaccagaagagcggtatctgggggatcaggatatctaaattctagacttacagcctggccctgaatctaactatcaatgttgccttggaaaaactgctcaaacttttgatgtctaaagtttcagacttgtaaacttgagagggttgaggtccaaggtccct

SEQ ID NO: 3917 - DNA, 40 bp, Homo sapiens
  source 1..40: mol_type = other DNA
acagttgggcacggtggtaaagggcacagactctggagcc

SEQ ID NO: 3918 - DNA, 458 bp, Homo sapiens
  source 1..458: mol_type = other DNA
gtggtaggcttaattatgacttcccaaaagatatccctataccaatccctggaacctggaaatgttctcttctatagcaaaagatatgattaagttaaagtcttgagatggagagattattctgggtaatctgggagtgccctaaatgcagctacatctatgcttatatagaagcaaagggagatattaccacacagaagaggagaaagcacagtgaccacagaggcagagattggagtgatggagccgcagcaaaggaatgctgacagccaccagaagctggaggaggcaaagaacagattcttccccagagcctcttccagcaggagcatggccctacagataccgataaaactgatattggacttcctggcctccagaactatgggaataaatttattgtttcaagctatcaagtttgtgattatttgttactgctgccatagtaaattaataca

SEQ ID NO: 3919 - DNA, 311 bp, Homo sapiens
  source 1..311: mol_type = other DNA
ggccgggcgcggtagctcacgcctgtaatcctagcacttagggaggccgaggcaggcggatcacctgaggtcaggagttcgagaccagcctggccaacatgatgaaaccccgtctctactaaaaatacaataattagctgggcatggtggtgggcgcctgtaatcccagctactcaggaggctgaggcaggagaatcacttgaacccgggaggcagaggttgcggtgagccaagattgcgccattgctctctagcctgggtgacagagtaagactccgtctcaaaaaaaaaaaaaaaaagaaaagaaagaa

SEQ ID NO: 3920 - DNA, 281 bp, Homo sapiens
  source 1..281: mol_type = other DNA
aaatgaaatcattatctctacgagtatcgactctcctaaattcattgcagcattattcacaatagtcaagacatgaaaacaacctaaatatccattgacagatgaatggataaagaaattaccatatatatatatatttacacaatggaatattattccgactttaaaaaaaaaggaaatcctgccatttgcaacaacatggatgaacctggaggatactatgctaagtaaaataatccagacacagaaaggcaaatattgcgtgatctcacttaaatgtg

SEQ ID NO: 3921 - DNA, 451 bp, Homo sapiens
  source 1..451: mol_type = other DNA
gtgaaaggaaaataaatctttgggccccagaatcactaagctaaagggaaaagtcaatctgggaactgcttaggacaaacctgcctcccattcttttcaaagtcatccctctgctcactgagataaatgcgtatctgattgcctccttcggagagtctcatcagaaactcaaaaagaatgcaaccgtttgtctctcacctacctatgacctagaaactccctgcttcgagttgtccctcctttccagaccaaaccaatgttcatctcacatgtgttgattgatgtgtcataactccctaaagtgtataaaaccaaactgtgctctggccaccttgggcacatgtcttcagggtctcctgagctatgggtatgtcacgggcatatgttctcaacctgggcaaataaactttctaaattaactgaaacctgtctcagattttcggggttcaca

SEQ ID NO: 3922 - DNA, 320 bp, Homo sapiens
  source 1..320: mol_type = other DNA
ggctgggtgtggtggctcatgcctgtaatcccagcactttgggaagctgaggcaggcagatcacttgaggtcaggaattcgagaccagcctggccaacatggtgaaaccccatctctactaaaaataccaaaattagccaggcgtggtagtacacacctgtagtcctagctgcccgggaggcggaggcaggagaattgttttaacccaggaggcagaggctgcagtgagctggaggctgcactgagccaagattgcaccactgcaccccagcctgggcgacagaacgagactccatttcataaataaataaataaataaa

SEQ ID NO: 3923 - DNA, 301 bp, Homo sapiens
  source 1..301: mol_type = other DNA
ggccgggcgtggtggctcacacctgtaatcccaacagtttgggaggctgaggcgggcagatcacgtgaggtcaggagttcaagaccagcctggccagcatgatgaaaccccatctctactaaaaatataaaaattagctgggcgtgttgttgggcgcctgtaatcccagctactcaggaggctgaggcaggaaaactgtttgaactcaggaggtagaggttgcagtgagctgagattgcaccattgcactccagcctgggcaacgagcaaaactccatctcaaaaaaaaaaaaaaaaaaaa

SEQ ID NO: 3924 - DNA, 536 bp, Homo sapiens
  source 1..536: mol_type = other DNA
ccatggttcccaaactgtgcactgaagtgccctgtggtacttcagtgaattcacagggtaccttccttggaataattttaaagttttaacttttaaattctgatattaaaaaaacacagtgacatctgtcaaacgtcacatgaaattagcttgaggcagattacaggttcaactttatatcccatgtcattttgtgataatgttatatctctgcaaagcgtttgctgtgataaaaagcaagtgccacatggaaatcagtggggaataggaaatgtggaaggtggtgtccaatctgtttacaaggtttgagaacttatataagagaagctttacaatgttaagatataaatagatttaaaattgtttaaaattaaattgcttacatttatttaagatataaatacatataaagatgtatgaacctagctacttaatacctgaaaacattaggtaattcttttggcctaagggagccatgaaaaataaattatggagacactaagtacaccatgaaccgagaaagtttgggaactact

SEQ ID NO: 3925 - DNA, 425 bp, Homo sapiens
  source 1..425: mol_type = other DNA
cttacccagtctgtctgcttcccctcttgttcttctatacactattttcaatagacaagccagagttattcattcatcactcctctgttaaaaccctccaagggctttcccatcttcacagtggcctacaggaccttgcacaattcccactctacacacccaccaccgaactcttcagctctttgaccttctctccgccctcactttccctttttcatttcactgcagccacactggcatcctagcagacatgccctgtcttagggcctttgctcttttcctttgctcttgctggaaagttcttcccctagacaactgcatagtgtgctcactgacctccctcccctgtcttgattgacacattcaaatgttcttttagtgtggcctttcctattcacactattcacaattatacccctagctcc

SEQ ID NO: 3926 - DNA, 59 bp, Homo sapiens
  source 1..59: mol_type = other DNA
acctcttgcacttctaattctgtcttagcctttgctccctagaggactcaaactcatat

SEQ ID NO: 3927 - DNA, 297 bp, Homo sapiens
  source 1..297: mol_type = other DNA
gccgggcgcagtggctcacgcctgtaatcccagcactttgggaggccgaggcgggtggatcacgaggtcgggagattgagaccattctggctagtacggcaaaaccccatctctactaaaaatacaaaaaaaaaagtagccgggtgtggtggcgggcgcctgtagtcccagctactcgggaagctgaggcaggagaatggcgtgaacccgggaggcagagcttgcagtgagccgagatcgcgccactgcactccagcctgggcaacaaagcgagactccgtctcaaaaaaaaaagaa

SEQ ID NO: 3928 - DNA, 144 bp, Homo sapiens
  source 1..144: mol_type = other DNA
gaaagagacctaggttggaagttaaggtagaacctgttatctacgcccagttctgttaccaacagggggttgaaaagttactttactcatcaagtatcagtttcctaataggaagacagagctattcagcacttgctcctccta

SEQ ID NO: 3929 - DNA, 287 bp, Homo sapiens
  source 1..287: mol_type = other DNA
gccaagcacagtggctcatacctataatcccagcactttgggaggctgaggcgggcggataatctgaggttacgagtttgagattagcctggccaacatggtgaaaccctaaaaatacaaaaaattagccaggtgtggtggtaggcggctgtaggcccagatactctagaggctgaggcaggagatatgcttgaacccaggaggcagaggctgcagtgagctgtgattgtgccactgcactccagcctgggtaatgaagtgagactctgtctcacaagaaaaaaaaa

SEQ ID NO: 3930 - DNA, 98 bp, Homo sapiens
  source 1..98: mol_type = other DNA
tggcttaggaattaaggagcagtgaggtgcaacatccatttaaagattttttctttgctataattcccttgactctccccaagcctttagccaagttt

SEQ ID NO: 3931 - DNA, 301 bp, Homo sapiens
  source 1..301: mol_type = other DNA
ggccaggcgcggtggctcatgcttgtaatcccagcactttgggaggctgaggcgggtggatcatgaggtcaggagatcgagaccatcctggctaacatggtgaaaccccatctgtactaaaaaaaatacaaaaaattagctaggcatggtggcaggcacctgtagtcccagctacttgggaggctgaggcaggagaatggcgtgaacccaggatgcggagcttgcagtgagccgagatcgcaccactgcactccagcctgggtgacagagcaagactccatctcaaaaaaaaaaaaaaaaa

SEQ ID NO: 3932 - DNA, 347 bp, Homo sapiens
  source 1..347: mol_type = other DNA
tcttgtgtcagtccttcgatatgcctcaaattttcctgccttcttgtctttgtttattctatttcatttgcctttatccaccatattttcttatcaaagtccaatttatttcttatggatcagttaaacggtcacctccaggaaacatcagctgatcacccgaactagaagttatttcaccaccacccctgaattcctgaaattccttgttgtaaacatcacatacataggtagatatatattaataaatagactgtgtgtatacacatattgcatacatgctctctactcctccaggaaaggactgtctctctcatctttgtagccctctcccaacacctaataca

SEQ ID NO: 3933 - DNA, 160 bp, Homo sapiens
  source 1..160: mol_type = other DNA
atgtaatttttatttgtatgattgtatattttacgatgtccatcttttccaataaactgcaagtctcctcagggcagggatggcatctgtcctatcccccactgcatcctcatagcccatcacagtgcctggcacatggtaggtagtaaataaatatttg

SEQ ID NO: 3934 - DNA, 68 bp, Homo sapiens
  source 1..68: mol_type = other DNA
ggcccttgctagagtataaaacactaattgttgttctccaactcctctcacaagccttgcagagaaaa

SEQ ID NO: 3935 - DNA, 39 bp, Homo sapiens
  source 1..39: mol_type = other DNA
tcacatgtactcccaaacctaaaataaaagttaaaaaaa

SEQ ID NO: 3936 - DNA, 502 bp, Homo sapiens
  source 1..502: mol_type = other DNA
atccttggcataaaacataagagaatatctcgcaaccttagttaggtaaatttcttagctatgacaccaaaagaaaaaaactgataaacttaacataatcaaaattaaaaacagttgctcttcaaaagaaaccaacaagaaaatgcaaagacaagccacagactatttacaaatcatatatctaataaaggacttgtatctacaacatgtagaaaaactaagaagacaaaacaagtcaataaaaagatggacaaaaatttcattagagatttctccaaagaagatatacaaatatctaacaagcacatgaaaagatgctcaatatcatttatcattaaggaaatgcaaattgaaaccacaatgcgatactaccacacacccacttgaatggctgtattcaaaaagactgatgatgtccagtgttggtgaggctgtggagaacctgaaatcctcacatattgctatggaaacataaaaacatatagccattctgaaaaaacaa

SEQ ID NO: 3937 - DNA, 303 bp, Homo sapiens
  source 1..303: mol_type = other DNA
ggttgggcatggtggctcatgcctttaatccaagcacttgggaggtccaggtgggtggattactaaagctcaggaattcgagaccagtctgggtaatatagtgaaacctggtctctacaagtaataaaaaaaactaggtgggtatggtagaacatatgcctgtggtcccacctacttgggaggctgaggtgggaggatggtttgagcccaggagacagaggttgcccttagctgagatcacgctattatactccagcctgggcaacagagctagttccatctcaaaaaaaaaaaaaaagcaaa

SEQ ID NO: 3938 - DNA, 38 bp, Homo sapiens
  source 1..38: mol_type = other DNA
tccttcaaggcagggacagtgtcatttgctttatatcc

SEQ ID NO: 3939 - DNA, 137 bp, Homo sapiens
  source 1..137: mol_type = other DNA
gaatggagaagtaacttagctgctgtagaccccactttactcatctatagaacatttgattttagagaggtgtaaaaaagttaacatatgaaaagtgcctagtacagagcgagccctctgtaaagagtagttgtcat

SEQ ID NO: 3940 - DNA, 353 bp, Homo sapiens
  source 1..353: mol_type = other DNA
tgctatgaggtgaatgtttgtgtccccccaaaattcatatgttgaagcctaaatctctgatgtgatggcattaggatgtggtgtctttgaaagttgattaagtcatgaggttaagccctattggatgggattagtgcctttaggaagaggccccggggagctgtcttgccctattctactgtgggtggacatagcaagaaattatctgtgaaccaagaagtaggtcttcatcagacatggaatctgccagcaccttggcctttgatttcccagcctccagaattgtgacaagtaaatttctgttatgttaccctgtttatggtactttgttataacagcctgaatagactaag

SEQ ID NO: 3941 - DNA, 66 bp, Homo sapiens
  source 1..66: mol_type = other DNA
cggactcaaaagtcaaataacttagacaatgtgagtcttggctttgccaataacaagaaacaatga

SEQ ID NO: 3942 - DNA, 472 bp, Homo sapiens
  source 1..472: mol_type = other DNA
ccctgtcctgactctgctgcaggtggactggcctccttgatgccccatgagcaagccaggatgctcccaccacagggtctttcaccgaggctccctctgtctggaacactcttcctgcacatatccccatagctcgctgcttcttctttaggtctttgctcagatatcattttctggtgagttatttcctgaacctgtggcaagaaagtatattacgcatgtgcatatacacacacatacgtgcgcatgcacacacacacattgacatgttggaacccctgtaccccttcctttgttttattttttttctctgtaataccacctaagaaactatataatttgcagttgttgttttttttatgtttccctccctttagaatgtaaggtttgtgaggacagaaactttggactattgtgttcatgaatgtatcccagcaccaagaacactgcctggcatgtaataggtacttaa

SEQ ID NO: 3943 - DNA, 319 bp, Homo sapiens
  source 1..319: mol_type = other DNA
cagggcacggtggctcatgcctgtaatcccagaactttgggaggccgaggcaggaggatcacaagggcaggagatggagaccatattggctaacacggtgaaaccccgtctgtaataaaaatacaaaaaaaaaaaaaattagccgggtgtggtgctggacgcctatagtcccagctactcaggaggctgaggcaggagaatggcgtgaacccgggaggcagaccttgcagtgagccgagatcgcgccactgtactccagcctgggtaacacagcgagactccatctcaaaaaaaaccaaaaaaacaaaaaaacaaaaaa

SEQ ID NO: 3944 - DNA, 307 bp, Homo sapiens
  source 1..307: mol_type = other DNA
gccaggcgcagtggctcatgcctaatcccagcactttgtgaagccgaggcgggcagatcacctgaggtcaggagttcaagaccagcctggctaacatggtgaaaccctgtctctactaaaaatacaaaaattagctgcgcctggtggtgcatgtctgtaatcccagctacttgggaggctgaggcagaagaatcgcttgaacccaggaggcagagtttgcagtgaaccaagatcacactactgcactccagcctgggccacagagcaagactccatctcaaaaaaaaaaaagaaagaaagaaagaaa

SEQ ID NO: 3945 - DNA, 324 bp, Homo sapiens
  source 1..324: mol_type = other DNA
ccagtatctacgttgctttccccctcatcttcagggcttttcttgtatgtcatctctatggagacttctttggctgccttgtccaaaaaggtaacctacattagatgccccacctccattctctgctttattttttgccttaacgcttatcatgatctaacttactacatgtcttattgattcatctttttttttaatctcatgtgccagaatgtaggatttatgagagcaggaatttttgtctgttttgttcatgctatatccccagtgcctagaacaatgcctaaaacagagcatcagtaaatattagttgaattagtgaat

SEQ ID NO: 3946 - DNA, 52 bp, Homo sapiens
  source 1..52: mol_type = other DNA
ggaaggggcactggacttgtagaagaagcttaaggtcctgtcctggatttgc

SEQ ID NO: 3947 - DNA, 330 bp, Homo sapiens
  source 1..330: mol_type = other DNA
gctacgatttgaatatgttccccaaagttcatgtgttggaacctaatccccaatgcaacactgctgacaagtgggaccttaaagagctaattatgtgactagattagtgatattatcttgggagtgggattctgataaagggatgagtttggcccccctcctctctcttgcccttctgccttctgccaggggataacacagaaagaaggcctttaccagatgcaggccccttgaccttggacttcctaggctccaaacctgtaagtctttgttctttataaattacccagtctcaggtattctattatagcaacacaaaatggtctaaga

SEQ ID NO: 3948 - DNA, 275 bp, Homo sapiens
  source 1..275: mol_type = other DNA
caacactggtagatgcaagaagcaacagcactattggactgattggatcagggctctctccactgagtataagatttgggataggctttgggattggagaacctaaaatgtcatatttatttcactgtctttttgacaactcaggagaaggagggctgaacccatggagggagatactggacttactgctaagatgacagccttaaataattaactagagatttattaagatgaaacaagaattgtaactcatgattgtagagcaggtcatattg

SEQ ID NO: 3949 - DNA, 301 bp, Homo sapiens
  source 1..301: mol_type = other DNA
ggactggtggactccagggacttgccaataggatgcaatatcttgcattccaagttagcaaaatacacaattttgactggcaacctaaatttgtaagcttttgatgagctgtgtagaaataagtcatctcaggtcaattcttagaggaaggaatattcttaaaataataataatactttgtataatggtggctttgttgttagtgctactcaggcattaaggactctgcagtcagggagtgagtggtcttttcatctctgctttgagaggggtccccaaggccctaaggcactctcagggc

SEQ ID NO: 3950 - DNA, 794 bp, Homo sapiens
  source 1..794: mol_type = other DNA
ggcaacccttgcatacactgttggtgggaatgtaaattaatacatctgatatgtataacagtttggaggttcctcacaaagctaaaaataaagctactaaaagatccaccaatcccactgctgggtatatacccaaaagaaaggaaatcagtatattgaagagatatccgcattcccatgtttattgcagcactgttcactatagccaagacttgaaggcaacctaagtgtccatcaacagatgaatggattaaaaaaatgttgtactcatacacgatggagtactattcaaccataaaaaaggatgagatcctgtcatttgcaacaacatgggtggaactgaaggtcattatgttaagtgaaatcagccaggcgcagaaaggcaaacatcacatgttttcacttatatgtgggatctaaaaaatcaaaacaattgaactcatggacatagaaagtaggaggatggttaccagaggctaggaagagtgggaagtgggggaaatgggtaggggagaggtggagatggttaatgggtacaaaacaaatagaaagaatgaataagacctattatttgatagcacaacagagtgaatatattcaataataattttactgcatatcttaaaataactaaaagagtataattagatagtttgtaacacaaaggataaatgcttgaggggacagatgttccatttttcatgataagattattacacattgcatgcctgaatcaaaacatctcatgtacctcataactatacacacctactatgtagccgcaaaaattaaaa

SEQ ID NO: 3951 - DNA, 429 bp, Homo sapiens
  source 1..429: mol_type = other DNA
tgttatggattgaattatgtcctttaaaattcatatgttgaagtctcaacccccagtgcctgagaatgtggccttatttgcagacagggtctttatagttaaagtgagataattaggttaggccccaatccatatatgattagtgtccttataaaaagaggcaatttggagataggcagagtagaagaaggcctgtggaaatgaagacagagatctacaaaccaaaaatggccaaaggttgccagcaaaccactagaagccaggagagatgcatggaacagattctctctcacagcccttggaagggaccaaccctgcggacacctggatcttggacttcctgtctccagaactgtgaaataataaacttctgttgtgtaagcctccattttgtggtactttgttacagcagccccggcaaactaatac

SEQ ID NO: 3952 - DNA, 291 bp, Homo sapiens
  source 1..291: mol_type = other DNA
ctgggtgtggtggctcatgctaatcccagcactttgggaggcctgggcgggcagatcacttgaggtcgggaatttgagaccagcctggccaacatggtgaaaccccatctctactaaaaaaatgcaaaaatgagccaggtgtggtggtgggcgtctgtaatcccagctactcaggaggctgaggcaggagaatcacctcaacccaggaggcgaaggttgcagtgagctgtgatcatgcacttgcactacagcctgggcaacacagcgagactccatctcaaaaaaaaaaaa

SEQ ID NO: 3953 - DNA, 313 bp, Homo sapiens
  source 1..313: mol_type = other DNA
ggtcgggcgcagtggctcacacctgtagttccagcactttgggaggacagagtaggcggatcatgagatcaggagttcaagagcgccctggccagcatggtaaaaccccctctctactaaaaatacaaaaacaaaaattagccaggcatggtggtgcgtgcctgtaatcccagctactcgggaggctgaggcaggagaatcactggaacccaggaggcagaggtttcagtgagccaagattgtgccactgcactccagcctgggcaatagagcgagacgctgtctaaaaaaaaaaaaaaaaaaaaaaaaagaa

SEQ ID NO: 3954 - DNA, 70 bp, Homo sapiens
  source 1..70: mol_type = other DNA
ttaaacagcagagagggagtgagttcatgatcagactcattacctctaaaggtaatagcttaaaatttga

SEQ ID NO: 3955 - DNA, 39 bp, Homo sapiens
  source 1..39: mol_type = other DNA
gctttgcacaaagtatgtaatcaattaatacttgttgaa

SEQ ID NO: 3956 - DNA, 311 bp, Homo sapiens
  source 1..311: mol_type = other DNA
gctgggcgtggtgactcacgcttgtaatctcagcactttgggaggccaaggtggatgtatcacctgaggtcaggggttgaagaccagcttggccaacctggtaaaaccctgtctctactaaaaatacaaaaattagctgggcatggtggcaggtgcctgtaatcccaggtaatcaggtggctgaggcaggacaatcacttgaaccagggaggcagaggttgcagtgagccgagactgcagcattgcactccagcccaagtgacagggcgagactccgtctccaaaaaaaaaaaaacaaagaaagaaaaaaa

SEQ ID NO: 3957 - DNA, 173 bp, Homo sapiens
  source 1..173: mol_type = other DNA
atcccactcccctacttcctagctgtgtggccttgggaaagttacttggtttctctaagccttcatttcctaatttttaaaatggggttgctgtgagaattaaatgagatgatacatgtaacatgcgcagcgcccagcacatctaaagctctcaaaaccggttggctatcgtt

SEQ ID NO: 3958 - DNA, 159 bp, Homo sapiens
  source 1..159: mol_type = other DNA
tatgatgttgaggaagttgtatcagtctgattcttagttttttcatctgttaagtagaacgtactattacttaccttaaagagtggctttgagaattttgtaaggaacaaacatgtttttggttctggaatataggaggtgctcaataaaagttgactc

SEQ ID NO: 3959 - DNA, 311 bp, Homo sapiens
  source 1..311: mol_type = other DNA
gccaggcgcggtggctcacgcctgtaatcccagcactttgggaggccaaggtaggtggatcacctggggtcaggagttcgaggccagcccggccaacatggtgaaaccccgtttctactaaaaatacaaaaataagctggatgtggtggtgtgtgcctataatcccagctactcgggaagctgaggcagaagaatcacttgaacccgggaggcagaggctgcagtgagccaagatcaggccactgcactccagcctgggttacagagtgagactccatctcaaaaaaaaaaaaaaaaaaaaaaaaaaaaaa

SEQ ID NO: 3960 - DNA, 349 bp, Homo sapiens
  source 1..349: mol_type = other DNA
tatggactgaatgtctactccccaaattcatatgttgaaatcttaactccaaatatgatggtattaggaggtggagcctttgggaggtaactaggtcacaaggatggagccctcgtatatgagattagtgcccttataaaagggactccagaacagtctgttgccccctttctgccatatgaagaaacaatgagaagaggtcagtctgcaaactggaagagagccctcaccagaacttgaccaagctgacattctgatctcagccttccaaaactgtgagaagtaaattcctgttgttcataagccacccaatttatggcactttgttaatcgcagcctgtactaagac

SEQ ID NO: 3961 - DNA, 300 bp, Homo sapiens
  source 1..300: mol_type = other DNA
ccaggcacggtggctcacacctgtaatcccagcactttgagaggctgaggtgggtggatcacttgaggtcaggagttgaagaccagcctggccaacatggtgaaaccctgtccctattaaaaatacagtaattagccaggcatggtggcatatgcctgtaatcccagctactggggtggctgagacaggagaatcgcttgaacccaggagacagaggttgcagcgagccaagatcgcactattgcactccagccttggcaacagagcaagactatgtctcccaaaaaaaaaaaaaaaaaa

SEQ ID NO: 3962 - DNA, 856 bp, Homo sapiens
  source 1..856: mol_type = other DNA
accaatgtcatttttcacagaattagaaaaaaaaaatcctaatattcatgtggaaccgaaaaaaaaaaaaaaagccaaagtaatcctaaggggaaaaaaagctagctgcatcacactacctgacttcaaattatattacaaggctatagcaaccaacagagtatgggactgatattaaaatagataccaagatgaatggaacagaatagagaacccagaaatgaagccacatacctacaaccagctgattttcaacaaagtcaacaaaaatatacactggggaaaatgccaccttatttaataaatggtgctggaaaaaatgaatagccacatgcagaagaatgactggacccatacctcctttcaccatccacaaaaattaagatggattaaacacctaaatgtaagatctgaaactatgaaaatcctagaagaaaacttgggaaaaactcttccggacattggcctaggcaaatactttatgaccaagttctcaaaagcaaaagcgacaaaactaaaaatagacaaataggatttaattaaactaaaaagcttctgcacaacaaaaggaacaatcaacagagtaaacagacagtctatagaatgggaaaaaatatttgcatttgacaaagggctaatatccagaacctacaacgaactcaaacaactctacaagataaaaaaaaaattaaaaagtgagcaaaggaatgaacattttccaaaagacgtacaagcagccaacaaacacacacaaaaaaatgctcaaaatcactaatcatcagagaaatgcaaattaaacccacaatgagataccattttacaccagtcagaatgactattaaaaagtctaaaaaca

SEQ ID NO: 3963 - DNA, 1494 bp, Homo sapiens
  source 1..1494: mol_type = other DNA
aagacctactgtatagctatagtattcaagacaatgtgttattggtggagggatagacacatagatcaatggcatagtatatgaaacacagaaatagcctacacagatgtggccaacttaatttttgacaaaggagccaaatagttcaatggaggaaggttagaaatttcaacaaatgatgctggagaaactggacattcacaggtaaaataatgaaccttgacctaaacctcataccttctacaaaaattagctcaaaatggatcattggcttaaatacaaaatatgaaagtatacaacttttagaaaaaaataggttaaaatctttaggatctagggctaggcaatcagttcttagacttgacactgaaagcatgatccatagaaggaaagattgataaattgggccttatttgttctgtgtaagactcttgttaagagagaatggaaagacaaagctgcaggcttggagaaaatatttgcaaaccatatctcctgccaaaaaaaaaaacaaaacaaacaaacccccagtgtctagaatatataaataactcttaaaacctaactgcaaaaaataaacaattcaattaggaaatgaacaaaagacaagaagaaactttttaccaaagaagatatacagatgacaaataagtacaatgaaaagacgtacaacatcattaggcattagagagatgtaaattaaaatcacaataagttattactacacacctatcagaatgactaaaataagaaagtaacaacatcaagtgctggtgaggatgtgaggaaactggatcactcataatattgctgataggatacacaaaattgtacagccactctggaaaaaaaacagtgtggcagtttcctatgaacctaaacatgcaattaccatacgacccagcaattgcactcttgtgtatttatctgagagtgatgaaaacttatgttccaacaaaaacctgtacatgaatgtttgtagcaactttattggtgggcccaaactggcaacatcctgaatgttctgcaactgtcagtggtgaaattaattgtacacatatatacctagaatcctactcagcaatggaaaggtatgatacatgaaataatctggctgaatctccagggaatttttctgcatcaaagaaaactaatgcacataggtcacaagtgaatacctttatataagattcttgacatgacaaaattatgaaatggttgcccggagtcaggacttggagttggggatgggtgcggaaggagtttggttgtgtctatgaaaggacaacagaaggcatccttgtggtgatggaattgttttatattttgactgtgttaatgttaatatcatggttgtgattttgcatcatatttttgcaagatgtcactactatgacaatgtggctagagagtacatgggatctctatgtattatttcttacaactgcatgtgaatctacaattatctcaaaataaaaaaaatttaattaaaga

SEQ ID NO: 3964 - DNA, 1490 bp, Homo sapiens
  source 1..1490: mol_type = other DNA
agagaggattctaggcagctgaagctgtggcagaggtataaatttgaaagtaccaaaatatcctgaaaagaaacagaaacaggaagaggaaaaaaaagagaaggagaagaattaaaactacacaccctatctcaacataactagaaaacaaggaaactccaaacttcaaagtacttgtaaatataaatataaacatcaagacctacctacctctctcatgtgctcctgccagtagccttcatggagaccaagagcagttcaggagaaactacacaaacgagagcagagaggagttaagggcaggttgaaccatgatttaaaaccactgctagaaacagaaagaaactcagcccttggccctatatatactgaaaagtgaacagttagctcagaacactgataacagaaaggagacttgaaaacgcacatgggacatgacaagccaccttgcaaaggcgtcactttggagagaaaagacagctaaaacaacaggagaggtttctttggaaactatacattagagagagaaaaaggggagaacatttcgaattacataaaacaaaagaaaatttaaaaattggaaggcatatgccatttgaaaaccatgccatccagtaaagaaacaatactttgcttacaataacaggagagggtgctcttgaactagaaatgttaagccatcccaacatacagataaacaaaaacctagcataaaaagaaaattgaaaataaggacccaaacaattaaggtgataaaaaattccaccctctcacacaaacaaatggcaagacactggcaagaacagtggcaaaacagaagaaaaccataacactcaaaactaataaatatccataaattctgcaattaggtagatttaaaaaacaaccttgaaataagaattaaaaactaagtagagaaatgaatgaccagaaaattttaaaaggaaaaaataaaacaccaattgattgaacacagaaagaaaagagaagaaaaatacaaaatcacatcagaaatggaacgtaaattacaagatgcccaaggaaaaacagatttgaaagaaaatgcaataagagacactggaaaaatagtagaaaatcaactaaatgaataaaatgaaatagagaaaaaagtaaaaagggtcaaagagaaagtggctgaaatggaagacaggaaaaagaagatacaatttatatataaatggaatttctgaagaagactttttaaaataaaatatgactaataatgaaattctaaccaagaaagtattcaaacacaaacaaccacaacttatatactgaaagggcccactagccacggggtggggggaaaaaaaaaacttgtaacaatcaactcagagacatattttagtaaaagtagtagacattcaagataaaggaaaaatcctcagggaatccaggcaaatgaattcaaacaacatacacaagtaaaagaattagactggcaatagatttatcaaaaataagattca

SEQ ID NO: 3965 - DNA, 975 bp, Homo sapiens
  source 1..975: mol_type = other DNA
cttacctgcttctgaatttatctttgcctcttgagccaccttcactttcatttctggacgaagaggtgttctttcttctgttcaggtttgcctgtccatctgtgttctaggtcttctctcccagttcctcaggctcttgctccattagttattccatttcttgcccctttaatcagcttttctgtactgattgcttttctgagcttttgaacatgctcaggtctctctcatgtccaaaataaaaaatgacaataccccaaaccatcccttgattctgtgctcactactttattatttttttattatagttaagattttagaaacagttgtttatacttggtctttcttgcctctcctttgctctttcgccttttggagtctttggcagtcctgcttgttcttaccattgggatcgccttcatgaaggtcatcagtgatctctgacttgccaaatactttttgattttttttctggcattgtgtatacttttcaatgcttctctgaaattatgtacttttcttttgtatttgattctattgaatgttacttccttaaaaagttcttctgttttggtttttgtgattctactctttatgaatttttcttgttcatacatggctatttgttagtgaacttgctgtctgtcctctctctccttttcagaatttttgtgtcactgttctgtcttggacccttgaccttatcactctacaacctctcctggagcaaacccttttatgggtctgctgctatttccatattctctagcttcagcgtaggcatttctgttacacttcagatcatgacatccaattgcttcccagacatttccacttaaataacctacacacacttcatacttgatacatttgatgataataaaagtgttcctctttcctgtttgctatttcaatgggtgataacagcctttcctcagtttctcaaaccagagagttggtaagcatttccgactt

SEQ ID NO: 3966 - DNA, 1191 bp, Homo sapiens
  source 1..1191: mol_type = other DNA
aaagaaaactactgactgatatccttgatcaacacagatgctaaactccttaacaaaacactagctaacctaatccaacaacatatcaaaaagatagtccaccatgatcaagtgggtttcataccagggatgcaggagtagtttaacatacacaagtcaataactgtgatacaccatataaacagaattaaaaataaaaatcacatgatcatctcagtaggtaagaagtattcgacaaaatccagcatccgtttatgattaaaactttcagcaaaaatcgacatacaagggacatacctcaatgtaataaaagccatttatgacaaacccacagccaacataatactaaatggggaaaagttgaaagcattccttctgagtactggaacaagacaaggatgccccctcccaccacttctcttcagcatagtactggaagtcctagacagagcaaacagacaagagacagaaataaagggcatccaaatcggtaaagaggaattcaaactgtcactgtttgctgaaaacatgatcatttaccttgaaaaccctaaagactcctacagaaagctcctagaactgataaaagaattcagcaaaatttccagatataagattaatgtacacaaatcagtagttcttctatacaccaacagtgaccaagcagagaatcaaataaagaactcaaccccttttacaatagctgcaaaaaaaaaaaaaaaatacttaggaatacagctaaacaaggagttgaaagacctctacaaggaaaactacaaaatgctgctgaaagaaatcacagatgacacaaacaaatagaaacacatcccatgctcatggatgggtagaatcaatattgtgaaaatgaccatactgccaaaagcagtctacaaattcaaagcaatctccaccaaaataccaccattattcttcttcacagaattagaaaaaacaattctaaaattcatatggaaccaaaaaagagcctgcatagccaaagcaagactaagcaaaaagaacaaatctggaggcatcacactacctgatttcaaactatactgtaaggccatagtcatcaaaacagcgtggtactggtttaaaaataggcacatagaccaatggaacacaatagagaacccagaaataaacccaaatacatacagccaattggtcttcaacaaagcaaacaga

SEQ ID NO: 3967 - DNA, 1110 bp, Homo sapiens
  source 1..1110: mol_type = other DNA
ggaaaggcattttcaggagaggaattcaaggtggttgtggagcaaccatttgctaaagtgattagcatgactaaaaaagagacaaatgataatagccaagacatgggggaaaggcattgaacgcattttggagatcttccaggcagtgcagcccatcacaggcccagaggtctaagagaaaataacattttcagaggccatgcctggggctctgcttccttgctcagcctcaggacactgctcccagaatcctggctgctccagctccagctgatgcacagagccccaggtacagctcacatcaccaggtacagctagctcgggccaccaatctggccttggtgttttccacatgctgttaagcctccaggtgcacagaatgcgagagtgaaaaaatcttggcagcctccacctaggtttcagaggaacccaggtgtccaggcagaaaagcctgtcacagagacagagccttcacagaaagcctctactagtgcagtgcggaagggaaatgtggagttggaaccctcacacagaatccctaccagggaactacctggtggagctgtgggaagggcgctgttgccttccagaccttagaatggtagagccaccagcagcttgcaccctgagcctggaaaagccacaggcatttaactccaacccatgagagcagccaagggggctgaatcctggaaagccacagcagcagagctgcccaaagcatttggagcccacccattgtactagtgtgcccaggatgcaggatatggcatcgaaggacattgttttgaagcttttaaggtttaatgtatgcctggctgggttttagaaatatgtgggggcctactgcctgtttcttttggttaatttctcatttttgacatgggaatgtttacccaatgtctgtaccaccattgtatcttggaagtaaataacttgtttttgattttacaggctcatagatggaaggaacttgccttgagtccccagtaagacactggattttggacttttgaatcaacgatggagtgagtaaagactttggaggactgttaataaaggacaattgtattttgcaatgtggagaagataaaactggggagggggggc

SEQ ID NO: 3968 - DNA, 301 bp, Homo sapiens
  source 1..301: mol_type = other DNA
ggctgggtgcggtggctcacacccataatctcaacacttttgagagaccaaagcaggaggatcacttgagcccaggagctcaaggccagcctgggcaatacagcaagacccatctctacaaaatattaaaagcgagccagacatggtggtacatgcctatagtcccagctactcaggaggctgaggcaggaggataacctgagcccaggaggtggaggctgcagtgagccatgattgtgctactgtactccagcctgggtaacagagtgagaccttgtcaaaaaaaaaaaaaaaaaaaaaa

SEQ ID NO: 3969 - DNA, 200 bp, Homo sapiens
  source 1..200: mol_type = other DNA
aaagaggtgaggagagaaagaatattgaactaagatcaaaggaagtgcgtttcagctcaagctctgctactaaattcacagcatgactttaacaaagtgattctgttcctcttcagtcttcttttattgatccataaaatcaaaagcatgcaaaagaattacataatttctgaaacaattgcagctccataatctataat

SEQ ID NO: 3970 - DNA, 700 bp, Homo sapiens
  source 1..700: mol_type = other DNA
aaaccttacatactattctaaccctcctctccaccatcatctacatttaatcctcaccaagtcctgtctactattcttcctaaacattttttaaatgtttctacttctcgtccccagggtcaccatcccaattttggccaccatcatgttgaacatttccctgtatccactcttgccctctctaagaagtgtactttttaaaaccaaaatttagcactccactatgtaaaatgctccaatggcgtcccatcacccttagcaataaagtcaaaactccttacagtgccttataaggcactccgtgttgggcctgaataactctcctgccttatctgttaccagttttcctctcacactttattttccaaccttactgacctttcaattacaaactgcacaaatgctattcccttgccaggtacactccttttcctcctcctggccccaccccagtgctcacacctggcttattccaactcttcaggtctcagataaatcattttcttaagagattatccctgccccctccccattacatgacccccatactttctctgttacataccatcacttatttcatgtctgcatttcccactagatcaaaaggtctctgagggtttgtcttcaatactgtacacccagtgactagcaaaaatccggcatcaagaaggtattcaataaatacttgttgaaaaataaa

SEQ ID NO: 3971 - DNA, 2051 bp, Homo sapiens
  source 1..2051: mol_type = other DNA
aggtctggcatatttttcatcacgtttagtacaatactgtaaatctttaataacaccatggaacccatatgaagtgtcactagtgatgctggaaaggaccccaagaagcagagaaaagtcatgacattataggaaaaaagtgaactgcttgatatgtgactgaggtctccagctgtggttgcccaccacttcgagatacatgaatctggagtaagaatcattgtaaaacaaagaaaacaaaattcatgaagctgtcactacagctatgccagcagacacaaaacacatgcactttttgcaaaatatctttttatctcttattgaaaatgcagcttttatgtgggtgctggattgctataagaaaggcatacctgtggactatagtatgatttgagaaaaagtgatgtcattacacgacaacttaaagcaaaaggaagatgaaggatctaaagctagagaatttaatgctagcaaatgatggttttataattttagaaagaggtttggtttaagaaatgtcaagataacaggagatgcagcttctgccaaccaagaggcagcagatgagttcccaggtgccattaagaaaataattgaagagaaaggatacctacctgaacaggttttcaatgtagacgaaagtgccctattctgggaaaaaaatgccacaaaggacattagtaaggaagagaaggaatcaccaggatttaaggtagagataggcgacttctactgttcagtgcaaatgcagttgggtttatgacctagactgcccttacctataaagctgctgatgcccaagccctgaagggaaaagataaacaccagctgccagttttttaactttacaacaagaaggcctggacaatgacaaccctttttctggattggttccatcaatgctctgtccttgaagtcaggaagtacctgtcaataaaagactgccttttaaaagttctttcgatattggacaatgaagtggtctacttgcttccaaacacagtgtctctaattcggcctctagatcatggaatcataaagacttttaaggctcattacacacaatactctatggaaaggactgtcagtgctatgaggagaaccccaacaaagggaacataatgaaagtgtggaaggattataccattgaagatgctatcactgttacacaaaaagcagtgaaagccaccaaacctgaaacaataacttcctgctagagaaaactgtgttcagatgttgtgcatgacttcccagaatttacgacagagcctatcaaggaaaccatgaaagagaccgcagatatggcaaaaaggagcaggtggggtggggtgggtaaagggtttcaagatatggatcttggagaaattcaaaagctaatagacaccacaccagaggaataaaacagaaggcaactggataaagatgagtgcttccaaaccaatgcaaaatgatgaagaagacataaaaatgccagaaaacaaactgacattagataatctaccagaagattctgattattcaagactgctttgggcttcttttacaacatggaccattctatgatccagacgctgaaacttgcaaatttgtatcatatacaaatatttttagataaatgacaaagcaaaaattcagacagaaattatgatgtatttttgtaaagttataccgaatgtccctgcctctcctgcctcccctttcacctcctccatctctgccacccctgagacagcaagatcaactcctccttttcctcctccttctcggcctactaaacatgaaaatgatgaagaagaaaacctttgtaatgatccacttccacttaatgaacagtaaatatattttctcttccttatgattttcttattatgagaatatagtatataatacttatacaaaatatgcgttgattgaccatttaggttatcagtagggcttccagtcaagtaggctactagtagttaagttttgtgggagccaaaagttatattcagatttttgactgcacatgggttagcatccctaacccctgcactgttcaagggtcaact

SEQ ID NO: 3972 - DNA, 410 bp, Homo sapiens
  source 1..410: mol_type = other DNA
tgctcagtctcctaacctcctcaacccttgcatctgcttggaaaggcccatgctgtctccttggcatcttgaggcaggtcctttcctctgtttagattgtcctcccatccctcctcctgtccactttggtttggttaacttttagttattcttcaggattcagctgagatgtgtccatctcctggacttcctccctgccacccagcctgggatgcatccctcttaacatgttttcataaaatcctacacccaggaccaatctatgcacttatgtaatagttgctcatttgcttgtgtgtttcaactgcacttggtcttctagagagtgggaactgtgtctgattcattctttcattttttacccattgtctcattcataaacagagaaaaatatttgttgaatgagtgaa

SEQ ID NO: 3973 - DNA, 205 bp, Homo sapiens
  source 1..205: mol_type = other DNA
gtggtgatgggggtgtcaaccatccagatatccactagaagtctcatttggttagaagtagggcacccaacaggttcttgacttactttggtaacaattttatctcccagatggtagaggaagcaattaggggaacttcaactctggacctaattctgaccaagaagaaaaaaatagttggtaaaatgaaaattgataggaacat

SEQ ID NO: 3974 - DNA, 3902 bp, Homo sapiens
  source 1..3902: mol_type = other DNA
gggcaagatggccgactagatgcagccaggtggaacagctgccaccaagggaccgagatgactggcacagtcctaacagatattcagagggaaggcactgagagtagactgaggaagacacagaagctgggctgaagtgggaagaagctgggagccctacatgaggctgctacacactgggactcattcctggcccccagcaatgccagggaatggggagagttaaaatggcaaggagtgacctgctcttgccatggacctttggaatcccagcaggaggagacccctcaactgccagggccacttgagtggcagagagagctgcttagagaagtggtagaggcagcactgcagtcagtatggagccctgtgggtttggtgtgggaacatctgtaccagagtatggccagggatgcccatccccctaatttcaacttgttctcacgggagactttagccctaggggaactgtcagacctgacctctgctgggcagtcttgaccatctgatgagaccggtttgacttgagcatgtgttggtgtactagcctgtctcagggccccagcctggctgtgcctgcttgcagtacagcctcaggtgccctgggggcctgcatcatagctcctgctgtggcagatggtacctgaccagcagagagctccagcagagcagcacccacccagtccctcccttcactgcagcgtcccctgggcccatggccaacccccaatcactttaccgacatgtgtgtgtgcaggcaaatcttttcttccctaccacaccagcatgtttgtatgcatgaaccctgctctgccactgctgccatcatgagtgctctccgccccccatacccttgccatatcactgttacagttagggccttggcagtcacagaaccctacccctgtaccaacattgttgccagagtgaaactaggcacagagagcaacaaaccctcccccaccctgagcagccacctttacctgcatgaatgcacacagagggtagacacacacctgcacccaccagtgccctgccctcatgctaacaccaccaccagtgtgaccatgcacagagtcaccaatgggggcacctcttcctctgagacatgccgcctccatcactgctgtgaatacctgcatgaaagctgacaccccaacacctggtagcactctgttgcagctgatgagcatgcaccctgccatgcttctgctgcagctggcaaatgagaatgaggattgatctgctaccactggcctacaaaacacttcggctgacaccatccatcaaagtgtggtgactagtggtctggtagtatctcgatccccaccagcacagtgggttcctaaccttgaggagccagagagaagagtcaaggatcaatatcagtcccctagcgttagggcatgcagtccaggagttgtgagctgagctttgccccccaatatattccagaaatgaaggcagtcgactgaacccaccttatatctaccacaataaaactctcaaagtcatcaaatagggtaagagaaaaaacacaatgaaaccatcaaaggacagcaacttcaaagattgaaggaatatcagcctgcaaagatgagaaagaatcagctcaagatactaatctttgctttggctcagtacccagctcaaatctttgtatatcagccaattgggaaaaatatgagggagccaatagttcccaaaggacatttttaaataccttccacctcaattcgactcaaaaagccagagtatcttctttcctccaaactatcacactagctctctagcaagtgttctaaacttggctcatatgactgaaatgacagaaatagaattcagaatatggataggaatgaagataattgagatgcaagaatacattgaaactcaatccaaagaagctaataatcacaataaaatggtataggaacttaaagacaaaatagccagtataaaaaagaacatcattgacctgagagagctgaaaaacacactacaagaatttcataatgtaattgcaaatgttaatagcagaatagaccaagtggaggaatgaatttcagagcttgaagactgattttctgaaataacagtcagacaaaaatagagaaaaaaaatgaaaatctccaagaaatgtgggattaaataaagagaccaaatctatgactcattggtgctcctgaaaaagatgcggagaatgaaagcaactttgaaaacatgtttcagaatatcatcaatgagaccctccctaagctagctagagaggccagccttaaaattcaggaaatgcagagaataccagcaaggaacttcacgtgaagtgacacacaatcatcatattccccaaggtcaaaaatgaaacaaaaagacacaattatcatattccccaaggtcaaaatgaaagaaaaagtgttacaggcagctagagagaaaagctaggtcacccacaaagaaaagaccatcagactgacagcagacctctcagcattaaccccacaagccacaagagattggaggccaatactcaatattcttaaagaaaagaaatctaacccagaatttcatatatggacaaactaagcttcataagcaaaggagaaataagatccttttcagaaacggaaatactgagggaattctgaggttaccaccagacctgccttacaaagctcctgaaggaaccactaaatatggaaaggaaagaccattattagccactacaaaaacacacttaagtacacagaccagtgacactataaagcaaccacacaactctgcgtaacaaccagctaacatcacgatgacaggagcaaattcacatatctcaatactaaccttgaatgtaaataggctaaatgcccccaattaaaatgcacacagtgacaaactagataaataaccaagacccagtggtatgcggtcttcaagagaccaatctcacaggcagtgaaacccacaggctcaaaataaagggatggagaaaaatctaccaagcaaatgagaacagaaaaaagcaggggttgcaattctaatttcagacagtagactttaagctaacaaagaccaaaaatgacaaagaaggccactgcgtaaaggtaaaggattcaattcaataagatctgattatcctaaatatatatgcatgcaacacagaagaatccagatttaaaaagcaagttattggagactttcaaagagactcagacttcccccaaatgatagtgggcgacttccacactccactgacagtattaaacagaccattgagacagaaaattaataaagatatttaggacctgaattcatcactggaacaaatggaccttacagacatctacagaactcttcaccaccccaaaacagaatatacattcttctcattgccacatgacacattctctaacatcaaccacacaattgaacataaagcaatcctcagcaaatgcaaaagaactgaaatcataaccactctctcagactatagcacaagaaaattagaaatcaagactaagaaaattactcaaaatcatacaattacatggaaattaaataacctgctcctgaatgaccttggatgaataatgaaattaagggagaaatcaaaaagttctttgaaactaatgagaacaaagatacaacacaccagaatctctgggacacagctgagggagtgttaagagggaaatttagtgcactgaatgcccatatcagaaagttagaaagatatcaaattatcaacctaatatcatactaaaagaactggacaaccaagagcaaatcaacctcacagcttgcagaagacaagaaataaccaaaatcagagctgaactgaaggagactgagacatgaaaaagcattcaaaggatcaatgaatccaggatttttttttattttta

SEQ ID NO: 3975 - DNA, 2349 bp, Homo sapiens
  source 1..2349: mol_type = other DNA
gtttctatacgattttcctcccatccctgtaaatcccagctttcaatctctggtcggcagattatattgatcattatcttcactgttgcaaccatttaatgatactgcaattaacccctccttgtttctcaactattttatctcctgcctaactgccactctcttcaacatgactcctaatttagttattggcaatttcaataaacacatatatgatatccttcctaaaatttggcatcttaattccttaatcttctttcctctaacatcttgtcctccactctattgcagccaaataagtccaggtcatttatagacatatccattaccagtagtgtccatacttctataatccctgtttcatgcatctatgtctctgatcattatcttctatctttctagctcatttgctctagtatcccaactctagcagtcatttgatgccaacatgaccttaaatcaattgatcccgcatatttttcaaggccccttaacatctttcattaggcaaaattacagccctacataaatctaactcactgtttcttcaacacctgcacctgtgcaattaaagatgcacagagaaacacacaggtcttaatgatctcactttaaattcaatttgacaaattgttagaggactcctacagctgcccacaatataatatatttaaccagtccatgtactctccactatcttggagaactatttcacagtttttcctttcttctgaacacctccaccctaatgctctcagttcatgactttgcttctttttccactgataaaattgaagtaaccagggagaagcttcagaaagtctcacagcctcatatatgtacccacaaccaaactcatatactctgttctctatcaagtttcttgagataaaaatattctctcctcagtaaaaccttcccttatgcacaaatacaattcatttcacctatttaaaactacacattggaattacttctttttctttgcgtcactattttttccttatgtagtcatagtaatcaccaccagcaaaacaaaaatgttattcttctccaatctgaaacataatcctgctttaaaccacattttgcccattagttttaattccagttgtcttctcccttttacaacaaaatagctagagagtgttgaccattgctagtaacactagttccatcctcttacaatttgtaatcctttccaatcaggtgtttcctctgataattacaacaaaagcatccttgtcaagatcaccaatgaactctggattgccaaatcaaatggccatcttttcaattcttaccatacttggcttatcaacatcaagtccattgtccttgatatactttctttattggcttccatgacgccacactaattgttctcttctaaccacgttattatccctgcctacctgacatttcattgagatgtcaaatagatatttcaaaactagcatgcccaaaactgaagttttcgtttcctttgccccctacaaacttactccactaagattctttctcatttctcacataggtggatggcaatagcatccgctcagttgatgaaacaaacatgctggcttcatttcagatctttcccttctctcatatacacatccaatttgttggaaatcctattgtaatatctttacatatatgcagaattcccagttatttctcaaaatttctattgataccaccctgataccaagtcacagttatcacttacgtggattactatattcctttctaaactggttttctttcttctatgtgcaaactgtttttgaacccagtaggtacagtgatccttgtgtaatgtaagtctctcttctgctctaaatcccctactagttcttcatctcagtgtaaaagtcaagtgattacaagcacctgtgaaacactacagtgaatatgattaggctccactccctttctgacctaatggctccctcattcacttacctttagccacctgtcctctttattatacagtgaacataccagatatacacatgctttgaaggcttgcactgccactagtccttaagagtgttgtcctccagatatctgcttagatattcccctaaacttcaagtctttgctcagatgccactttctcactgaggccaattttgaccacctaatttaaaaatgcaacctgatccccttcccttccctctgctctgtgttttcaacagcactgaccactctctactatctcaataatttgtgtgtgtgtgcacatgtctatgtgcgcacgtgtgtgggtttccctaatgtaacccaagtgcctagaatagtcccggacagttggtagatgttcagaaaatattttctatataa

SEQ ID NO: 3976 - DNA, 515 bp, Homo sapiens
  source 1..515: mol_type = other DNA
ttaattattcttccacttcatcatgtcatctggtgctttcatactaccatcatgggcctttcctgattcattagcttctctcacccttcccttctgccttcttttcaattcttaaccagcttagattacatggatcatcatgtcaataagtacatgtcaatatcccaatttcccttgccccattagttctggccttccaatcaagaaaatcatcaacccccaatgaagtcaactatctgtgttttctgtcctatgtcagtgcagcgtagcttagctagtaacaataacaatgtacattaaactactaccactataactactttatatttgttagctttgacaggactatcaacattgccatgtaatcatactatgttttgtctctcctaccctctgaaaagattatttcaagcttgctctattctctacaaaactccaagtccctattactcccttcattctgaaaatgacctggcctgaacaaaaacaaaaacaacaccaaaaaagagaagttc

SEQ ID NO: 3977 - DNA, 715 bp, Homo sapiens
  source 1..715: mol_type = other DNA
ttaccacaacttccttcttgcaacactgttttatttttttctataccaaggtaaatttttgttctgctcctacctctctgcacccattttaacaaggcctttgcttgcccatttttctctacttttctgttgaatgttgggatcttctaggctcagtctgggctctcctttccttttcattctgtagtcttctccagaccaactaaattgatgaatggcattaggccaaaacctgtcattcatgccagtgacccatgattatatctccagtccagttctctcctgacattcagaggaatatattctttatcttctagatattgtcacagatgttcagaagcacatcaaattcagctaagtccaaagctacacaatactacacccctaccttccttgtgtgttccattcttaaagaaagggacaggcatccatccgtttacaaaatcagaaaccgagaagtcattctgaacgtctttgtttcttttgccctttatccaatccactagcaagccatattgatatattttacctccagagatatctgagtaactgtttctccacatttctaccattatgacacccaagtacagctgccatctatcttctcttgccaacattgcttcaatagtatcaataatgttctctgtaacctgcccatatcttctcttagagctctttttttatacatatataacagccagagagagttttgaaa

SEQ ID NO: 3978 - DNA, 1144 bp, Homo sapiens
  source 1..1144: mol_type = other DNA
aagatagccaactagacacagccatttggaacatgtgatgctgagggactggaacatcaggtagactggcagattccaagcagatcttcagagggaaggcactgggagtggacagagggaggatacagacactgggctgaaggggaagggagctgggaaacctgcacaggactactgagcaccaggacctgttcctggcctccagcaactcctggggaagaagtgaatttaatagatgaggagtggcttgctctcacaatgaacctctggaatctgggcagcaagaagccctgacgcccccatggactcttgagttggtgatgagagatgcttagagcagtgctgagagcaggctccagctagtgaagagcacagagggtttggtgtgtcaacgttagcagtggagcgtggccagtgatacccatcgcccaaggctcaccatgttctctaggagactttagccatggggtaactgtaggaactaggtagagcagggcggtcatgcccctgagatggagccagtaccatctgagcaccctctgtctgctggcctctcctggggccccaacctggccattcctgctaggcagcatggcctcagatgctcaaacggggtgctcctcaagagtcctcatcgtagctcctttgccagtgactatgcctgaccattggagagctccagtagaccagcccttgacagtgtgtgccagtccacctgatcatctctctattgcagcctgcaccatgccactttgccagcacacactcatccaaagccactccccaactgctttgctggtgcatgtgtgtaggcagaccttgcctcttctcccccaccactgtgcgcatgtaccatgtcataccaccactaccagaatgagcacaacccagtgccctcccccagctgatgtgtgagcactcagccataacaccattgttggcaggagcacacatatggactccagagaccctgtcccctctcctcactccagtgtttctgccaccacagtgaaccagctcatgacactggtggtcccatcctccctgtaccaccaacctggtaagtgagaacatgtgcaggaatgctggtgaccccacccaatcctgcactgccactgccaccattgcgaatgtgcatacaatc

SEQ ID NO: 3979 - DNA, 2379 bp, Homo sapiens
  source 1..2379: mol_type = other DNA
gcaccacctgtccaacagcatgtgctcactttgtgactctatgtgacattataaattttaaaatatttcaagctttttcattattatcatatctgttactgtaatctgtgatcagtgatctttgatgttactattgtaactgttttcaggtgtcacgaattgtgtccctataagatggcaaacttaataaatgtgtatattctgactgctctatctatcagctattcccctaactctctccctctcctttgccctctctggtccctgagacacaatgatattgaaattattattcagtgtcctcaagtgttctaataaggtgaagagacacacgtctttcactttaaaccaaaagctagaaatgattccgcttagtgagagtagcatgtgaaaagctgaaataggccaaaacctaggcctcttgcccaaaacagtcaagttgtggatgcaaaggaaaagatcctgaagaaaattaaaagtgctattttggtgaactcatgaatgataataaagtgaaacagccttactgctgatatggagaaagttttagtggtctggataagagatcaaaccagccacaacatttccttaagacaaagcctaatccagagcaaggccctaactctctttaattctttgaagcctgagagaggtgaggaagctgcagaagacaaatttgaagctagcacaggttggttcatgaggtttacggaaagaagccatctccatgacataaaagtacaaggtgaagcagtaagtgctaatatagatggaagctgcaacacgttttccagatcttgctaagttaattgatgaaggtagctacactaagcaacagattttctatgtaaatgaaacaaccttctattaaaagaagatgccatctaggactttcataggtagagaggagaagtcaatgtctagcagcaagtcttcaaaggacagactgactttcttgttaggggataatgcagctggtgacttcatttgaagccaatgttcatttaccattctgaaaatcctagggcctttaacaattgtgctaaatccagcctgcctgtgctctagaaatgaaacagcaaaattttgacgacagcatatgggtttacagcatggtttactgaatattttaagcccaatattgagacaaattgctcagaaaaaaaagaaagtttcttttctaagtattactgcttattgacaatggtcctggtcacccaagagctctgagagaaatgtacaagaagatcaccactgtttttatgcctgctaacgtaacatgtatcctgcatcccatagatgaaggagtaattttgactttcaagactatttaagaaaaacattttgtaaagttatagctgacatagagagtgattccactgatgaatctggcaaaatcaattgaaaaccttctggaagtattcaccattctaaatgccattaagcacattcatgatttgcaggaggtcaaatattgatgttatcaggaatttaaaagaagttgatctggaaaaaataaaaatttaaaaaaattaaaaagaaaatattgtgaatcattatcagatctgacaaaaataattaaaaagaaagaagtttattacatccctcatgggtgactttgaggagttcaagacttcagtggagaaagtaactatagatgtatcatgaacaccaagagaactagaattagaagtggagcctaatgatatggctgaattgctgccatcctgtgatcgaaggatggcatcctttagtggaggaggatgtgctttttattgatgagcaaaagagtagtttcttgagatggagtctattcctggtgaagatactgtgaatattgttgcaatgacaacaaaggctttaggatattacacaaattttgttgataaagcaatgcagggtatgagaagattgactccaattgtaaaagaagttctactcttggtaaaatactatcaaacaacatcacacgctattagggaaatcattagtgaaaagaagtgtcaatcagtatgaaaaatttcattgctgcgttattctaagaaattgccacagccactgaaccttcgggaacaccaccgtgatcagtcagcaaccatcaacatcaaggcaagactctccaccagtaaaaagattaagactcactgacagtccagatgattgttaacattttttagcaatatatatttttttaattaaggtatatatattgtttttgtagacacagttctactgcacacttaatagactacaatatagtgtaaacatagcttttatatgcactgggaaaccaaacaattcgcgtgacttgctttattcagatattcactttattgtggttgtgtggaactgaacgacacagtatctctgaggtaagcc

SEQ ID NO: 3980 - DNA, 294 bp, Homo sapiens
  source 1..294: mol_type = other DNA
gccccccttttctcttgatgtaagtggacattttaatccataatctgtaacatttatgtattaagtttactactatctttggtttgcagtgttgactcacctgtggagtggtctgagcctgaatgcccggggctgtggccaccgagtgaacgggctgtgctaaggggaattgccaccttgggaaacctgtgtagttgcggcttttctgattaagtatcaataaaagtctgaccttgtgaaaaaagcaaacgtgagtggccctgcttatgtttcaccttgcgttgctcagtgata

SEQ ID NO: 3981 - DNA, 531 bp, Homo sapiens
  source 1..531: mol_type = other DNA
tgaactgaagggtggctagatggctggtattgtttctggtgtgatggtgctcccagagagactgaaatttgagtcagtggactaggagaggaagatccaccctcagtgggggtgggcaccctccaaccggctgccagcgcggctagaacaaggcaggcagaagaaagtaggtaagctagcttgctgagtcttctggctttcgtctttaccccatgctggatgcttctgtccattcctcctgcccttggacatcacactccaggttctttggccttccggctctgggactaacaccagtagctttccggggtctctgggcatttggccacagactgaagcctgaactgttggattccgtttgaggctgttggactccggctgagccactgctggcttcctcgctcctcagcttgcagatggcctgtcatgggactttgccttgtgatggtgtgagccagttcttcataaactttctttcatatgtacatatatcctattagttctgtccttctgcagcaccttgactaagac

SEQ ID NO: 3982 - DNA, 375 bp, Homo sapiens
  source 1..375: mol_type = other DNA
atttagtatattggcataatggaatattactcagccacaaaaaggaatgaagtacttatacatactataacatggatgaaactgaaaacattatgccaagtgaacaaagacagacagaaaaggccacaagttgcatgattctatttatatgaaatgtccaggataggcaaatttatagagacagaaagtagattagtggttgctaggagctggggtcatggagaatggggaatggctgctaaggaacatggggtttctttttggggtcattaaaacattctggaattagtggtgatggctgcacaacttcacgaatatattaaaaaccactggaccattttaaaaagatgaattgtataatgtgtgaattttatc

SEQ ID NO: 3983 - DNA, 71 bp, Homo sapiens
  source 1..71: mol_type = other DNA
tgttcttagagccaatgaggtagcctgacatatgtattaagtgctcagtaagggtctgtcaactgactaaa

SEQ ID NO: 3984 - DNA, 171 bp, Homo sapiens
  source 1..171: mol_type = other DNA
tgtgatgttaggcaacttatctgagttctctgtgccgggttccctcatttgtaaaaggtgtaagatgaaaacaccaatatcaaagggttttgaggagaatgaaatgagaaaatgtacataaaatgctcagtgctgaaactgcacctagtagacacttgagcagatggtaac

SEQ ID NO: 3985 - DNA, 296 bp, Homo sapiens
  source 1..296: mol_type = other DNA
gccaggcgcagtggctcatgcctgtaatcccagcactttgggaggccgaggcgggcagatcatgaagtcaagagattgagaccatcctggccaacatggtaaaaccccgtctctactaaaaatacaaaaattaactgggcgtcatggtgtgcgcctataatcccagctacttggaaatccgaggcaggagaatcacttgaacctgggagccggaggttgcagtgagccgagatcgtgccactgcactcctgactggcgacagagtgggactccatctcaaaaaaaaaaaaaaaaaa

SEQ ID NO: 3986 - DNA, 185 bp, Homo sapiens
  source 1..185: mol_type = other DNA
caaactgtatttgaagctcaggcccaagctgtctatataccttcaagaaataacataacctggggctctgtttttttcaacggtgaaatggggggctgttctgagcattaaatgagataaataaagtgtgaagcacttgtcacagagcctgcttctaaacagaaagctctcaacaaatgttagct

SEQ ID NO: 3987 - DNA, 176 bp, Homo sapiens
  source 1..176: mol_type = other DNA
ataaataaaatatataaattttggataataaaaactgtctaaaaggactatagcagttttttaagtggctattcctgagggaaataaaataatgattttatgtttttctttgtacttgaacctatttctaaattttctacaatgaatatttactacttttaaaatagcaattaaaa

SEQ ID NO: 3988 - DNA, 372 bp, Homo sapiens
  source 1..372: mol_type = other DNA
tgatatggtttagctctgtgtccctgcccaaatctcatcttgaattgtaatccaaattgtaatccccatgtgttgaggagggaccaagtgggaagtgattggatcatgggggcagtttcccccatgctgttctcatgatagtgagtgagttctcacgagatttgatggctttataagtgttccgcagtttctcctttgctcacactctcattctctctctcatgctgccatgtaatacatgccttgcttaccctttgctttccactatgattgtaagattcctgaggcctctccacctatgcagaactgtgagtcaattcaatctctttcttttacacatcacttactctcagtgtgaaaatggactaatac

SEQ ID NO: 3989 - DNA, 306 bp, Homo sapiens
  source 1..306: mol_type = other DNA
gccgggcgtggtgtctcacgcctgtgatcccagcactttgggaggccgaggcgggcggatcacgaggtcaggagatcgagaccatcttggctaacacggtgaaaccccgtctctactaaaaacacaaaaaattagccaggcgtggtggcaggcgcctatagtcccagctactcgggaggctgaggcaggagaatggcgtgaaccctggggggcggagcctgcagtgagccgagatagcgccactgcactccagcctgggcggcagcgagactccgtctcaaaaaaaaaaaaaagaaagaaaagaaa

SEQ ID NO: 3990 - DNA, 592 bp, Homo sapiens
  source 1..592: mol_type = other DNA
taaaacccttcactggttctgcatcacttttggaataaagttcaaactgcttgttattgcatggcaggctctgtgtaggtttactagtcttagtgcttaagcctccccaactagcatccttcccttacattgaactccatgaagtcccctgaagatgcaagaccacattcttccaggttgcatttgtacatttggcttccccattgatggcatattcctctccactgtcttcatttccctgcctcctcattcttcaagactcaagttgagcattgcatccactaggaggccatctctgactctgcttctgtccccctaagtctggccctggcaatggccacaggactgcacactcaaggagacaccatacccatagatggtaaatggtgctcctctggaggttgtacgatgtgctcagcttctccagacttcatagcagttaccacattatggtaattgtctatttacttttgtgtctctgccagcaatctctgagccccataatggaagtaaataagtcttttatctctttatctccatggccaaactaaagtaaagctctctttcactaaatattcactgcatggctgaa

SEQ ID NO: 3991 - DNA, 229 bp, Homo sapiens
  source 1..229: mol_type = other DNA
gtacagtggacagaagtttgcaaagctttagattcagggagacttgggttcaaatactgactccattcctttctagttgtgtaaacttgggcaagccatttaatatcagcttcccaaactgtaaaatgaagacaatgaggccaacttcataagagtgaagtgaggtctacgtcaaatattgtctggttccaatgcctggtagagtcacacaatacacagtagctattac

SEQ ID NO: 3992 - DNA, 318 bp, Homo sapiens
  source 1..318: mol_type = other DNA
ggcatacaactgctaagaaacatatgaaaaactactcaccatcactaatcatcggagaaatacaaaccaaaaccacaatgagataccatctcataccattcagaatggctattattaaaaagccaacaaacattgcatctagtgaggctgcagggaaaagggaatgcttatacactgttggtgggaatataaattagtccagccattgtggaaagcaatctggagatttctcaagaacttaaaacagagctaccgtttgacccagcaatcccattactgggtatacacccaaaagaaaataaatcattctaccaaaaa

SEQ ID NO: 3993 - DNA, 476 bp, Homo sapiens
  source 1..476: mol_type = other DNA
tcttctaagaagtgacatatgcacttatatgttcattgctgtgctagtcacaatagcaaagatatggaatcaacccatgtgctcagtggtagattaaaaaaatgtagtacatatacactatggaacactacacagtcataaaaaatgaaatcatgtttttttgcagcaagatggatggagctgcaggtcataatcctaagtgaactaatgcagggacagaaaaccaagtacctcatgttctcacttataagtgggagctaaacattaattacacatagacataaacatgggaacagtagacactgtggtgtacgagagagtggagaggtgggtgagttaaaaagtctccctatcaaatataatgctcactagctgagtgatgggatttgtactctaaacctcagcatcttttagtattctcatgtaacaaacctgcatatgtgctcttctatctaaaataaaagttgaagtaaaaa

SEQ ID NO: 3994 - DNA, 210 bp, Homo sapiens
  source 1..210: mol_type = other DNA
cacaggggggaaaatcagaccttaaagttcagtagacttgattttaaactccagcaccaatacttattagtcatataaaaattgtcaacttacttaaactccccaagcttcagtttcttcacctatagaatggaaaagttaaaaatggtcaccctatagggttgtggtgaggtttaaatgacctaaaatttgcaaagcagtacagtccct

SEQ ID NO: 3995 - DNA, 282 bp, Homo sapiens
  source 1..282: mol_type = other DNA
ggcctggtgcagtggctcacgcctgtaatcccaacattttgggaggccgaggcgggtggatcacgaggtcaggagatcaagaccatcctggctaacatggtgaaaccccgtctttactaaaaatacacaaaattagcctggcgtggtggtgggcgcctgtagtctcagctactcgggaggctgaggcaggagaatggcgtgaacctgggaggcggagcttgtagtaagccgagattgcaccactgcactccagcctgggcgacagagcgagactccgtctca

SEQ ID NO: 3996 - DNA, 313 bp, Homo sapiens
  source 1..313: mol_type = other DNA
ggctgggcgtggtggctcatgcctgtaatcccagcactttgggaggcctaggcaggcagatcaccagaggtcgggagttcaagaccagtctgaccaacatggagaaaccctgtctctactaaaaatacaaaaaattagccgggcatggtggcacatgcctgtaatccaagctactcaagaggctgaggcagaagaattgcttgaaccagggaggtggaggttgcggtgagctgagatcgcaccattgcactccagcctgggcaacagcagtgaaactctgtctcaaaaaaaaaaaaaaaagaaaaaaaaagaa

SEQ ID NO: 3997 - DNA, 147 bp, Homo sapiens
  source 1..147: mol_type = other DNA
tcaaaaggagtgatctccttctcactgaaggtattcaaactggaccttcttaaccataggttagagatgctgttgaagggattcttgtatcagctgtgatactgcactagctttttaaaggcattttacaacgttaagattcgttga

SEQ ID NO: 3998 - DNA, 562 bp, Homo sapiens
  source 1..562: mol_type = other DNA
tcctttagataaaattcttgaatggcttctcgctgcaattagaattacattcagttatgttagcaagggctttaagacctttttaatccctgacctggcccccaacctacttcagtagcttcctttcctgcaactctctccctcacccaccaggatccagcccacactggtcctctccttcacctctgaagaagccctgtcagtagcttttcagggccttgactcttgccattccccctggcttcctgcctccttcccatcacttttgcattggcccaaatgccgctccctctgagttttcccctgatcatgacagctaagtgtcaggctatctcactaagtcactactctttgcctttttgtttgctctgtggcacatcactatttgaaatactattatgtttttatttgttttatatgtttataattggtctcttcttatcagaatataagccccacaaggcaaactactttgtctcaatcattgcagtgttagtctttagtgctcgggagcatgtgtgtcatgttggaggtaaccccgaagcatttctctgatgaatga

SEQ ID NO: 3999 - DNA, 30 bp, Homo sapiens
  source 1..30: mol_type = other DNA
atccagcaatccctcttctgggtatatacc

SEQ ID NO: 4000 - DNA, 57 bp, Homo sapiens
  source 1..57: mol_type = other DNA
atgcaacatgtccatgtagcaaacctgcacatgcaccccttgaatttatattaaaaa

SEQ ID NO: 4001 - DNA, 211 bp, Homo sapiens
  source 1..211: mol_type = other DNA
tacagtggaaaggacatgagtttttaaatcacagacttaggtttgaatggaactctgttatttatcagttgttaattaaattctatgaagtttgatttcatcaataatatgaatagaaataataacaagtaattcccagagatgggtgaaagttgaatgtgaaagcatgtagtccactgacatgtaagaaggtgttcacaaagggtagctt

SEQ ID NO: 4002 - DNA, 63 bp, Homo sapiens
  source 1..63: mol_type = other DNA
caatgtagagtgaaatcgattttaattcacaggacatggattttagtcttggctctgtaacct

SEQ ID NO: 4003 - DNA, 292 bp, Homo sapiens
  source 1..292: mol_type = other DNA
gccaggtgcatggcttatgcctgtaatcccaggacattgggaggccaaggtgggtgaattacttgaggtcaggaggtcgagactagcctggccaacatggtgaaaccccatatctactaaaaatgcaaaaatttgctgagtgtggtggtgcacacttgggaggctgaagcacaggaatcacatgtacccaggaggcagaggttgcagtgagctaagatcatgccactgcactccagcctgggcaacagagtgagactctgtcaaaaaaaaaagaaaagaaaaaaaaaaagaa

SEQ ID NO: 4004 - DNA, 408 bp, Homo sapiens
  source 1..408: mol_type = other DNA
tgtcatgggttgaatggtgtccccccacaaagatatattaaagctctaaccgcctgataactcagagtgtgattttatttgcataaaagtttgttacagatgtaatcagttaagatgagatcaactggaggaggaggataactggtatgcttataagaggaggaaaatttggatacagacacagacacagagggaaacagccaagtgaagactgagactggaattgtgctgccacaagccacgcaatgcatggggctaccaggagatgaaagaggcaaggaagaatcttctagaggcttctggaagggcatgggcctacagacatcagaactatgagacaataaacttctgttgttctaacccacccagtttgtattactttgttttgcagtcctaggagatgaatac

SEQ ID NO: 4005 - DNA, 305 bp, Homo sapiens
  source 1..305: mol_type = other DNA
ggccaggtgcagtggctcatggctataattccagcactttgtgaggccacagcaggcagatcgattgagctcaggagttcgaaaccatctgggcaacatggcgaaaccccatctctacaaaaaacatttaaaaaattaaccaggcgtggttgtgtacacttactatagtcctagccactcgggaggctgaggtaggaggatcagttaagccagggagaggaaggttgcagtgagccgagattgtgcctctgcactccagcctgggtgacagagtgagaccctgtctcagagaaaaaaaaaaaaaa

SEQ ID NO: 4006 - DNA, 519 bp, Homo sapiens
  source 1..519: mol_type = other DNA
ggtggatacccacgtgatataaaaacaaatgtctacacaaaaacttgtgcacagatgttctttgcagcattatttataatagcccaaaattgaaacagccctaatttctatcaactaacaagtgaataaacaaaacgtggcatatccatacaaggaatattattcagcaataaaaaaagagatgaagtactgatatgcaccacaacatggaaaaaccttgaaaacatatcaagtgaagaatgccagacatgaaaggccacatattatatgatttcatttatatgaaatgtccagaacaggcgaatatatatagagagaaggcagattagtggttgcttaggctgaagggttggggaggacaaaggggtgactgctaattagtatggggtttcttttttggggtgatgtaaacgttgtaaagttgattgtggtaatggtggcacaactctgaatatactaaaaaccactgaattgtatactttgaatgtttgaactgtgtggtatgtagattttatctca

SEQ ID NO: 4007 - DNA, 726 bp, Homo sapiens
  source 1..726: mol_type = other DNA
aatataattgagggtccagaaatattgatcacatttatcatcaactgacttttgaaaatagtgctaagacaattcaatgggggcaaaatagtctttttcattaaatgatgcttggaaacatggatatccacatgcaaaataatgaaattggactcctacctcatattgcatataaaaattaactcaaagttgacctaagatctaaatgtaagagctaatattgtaagtatcttcaaagaaaacatggcgtaaatctttctgactttgaattaggcaatgatttcttaaataaatgacactaaaaacacaagcaacaaaagaagaaaataggtaaattaaaattaaaaccatttgtgtttccaaggacaatatcaagaaagcaaaaatacaacccacagaatgagataattttttttaaaatcatgtattagttaagggaggaatttgtatttagaatatgtaaagaactgttacaataataattaaaaggcatataattcaatttttaaaaatcaacaagagatctgaattaacagttctccaaagaagatacacaaaaggccaataagcacatgaaaaggttctcaacatcactagccatcagggaaatgcaaatgagatctacaatgagatatcacttaacactcactggaatagatatataatcaaagtgataatatcaagtgttggtgaggatgcagagaaattggaaccctcatgcactgt

SEQ ID NO: 4008 - DNA, 172 bp, Homo sapiens
  source 1..172: mol_type = other DNA
gctggatgtgatgacactcatctgtcgtctcagctactcagaggctgaggtgtaaggatggcttgagccccaaagttcgaagctgcaatgagctataactgggtcactgcaatccagcctggatgacagagttagaccttgactcaaaaaaaacaaaaaagaaaagaaaaaa

SEQ ID NO: 4009 - DNA, 112 bp, Homo sapiens
  source 1..112: mol_type = other DNA
ggtcaagcttggtggcttgtgcctgtaatcccaacactttgggagtctgaggcagaaagactgctagaggccaggagaccagcctgggaaacagtgagatcccatctctaca

SEQ ID NO: 4010 - DNA, 530 bp, Homo sapiens
  source 1..530: mol_type = other DNA
acaagatcacttcattaggcacaggaaaagtatttaacaaaattcaacaccctttcacaataaaaaataaaaaataaaaaaccctcaacaaactaggaatagaaggaaacttcctcaacctgataaagggcatctatgaagaacccatggttagcatcatacttaatggtgaaggactggattatttccccctgagatcagaaacaagacaaggatgtctgctttggccatttctattcaacttgtactggacagtcaagaaagggcaattaggcaagaaaataaaataaaagtcatctaggttggaaaggaagaagtataactaaatagagatgggagacgatatggtggttttgtgcatagtaatccaagggaaaactatagaaaatccaaaggcatgatttattaataaataaattcagcaaagttacaggatacaggattaaatatgcagaaattggttatctttcaatatagtatcaatgaataaatcaaaaatgatgttaagaaaacaatttaattttcaacaa

SEQ ID NO: 4011 - DNA, 229 bp, Homo sapiens
  source 1..229: mol_type = other DNA
atcctggctaacatggtgaaaccccgtctctactgaaaaatacaaaaaatttagccgggcgtggtggcgggtgcctgtagtcccagctacttgggaggctgaggcaggagaatggcgtgaacccaggaggcggagcttgcagtgagccgagatcgcgccactgcactccagcctgggtgacagagcgagactccatctcaaaaaacaacaacaacaaaaaaaaaacaaa

SEQ ID NO: 4012 - DNA, 343 bp, Homo sapiens
  source 1..343: mol_type = other DNA
agtagttccttcttatccaagttttcgctttccatggtttcagttacccactgtcaatctggtctgaaaataggtgaataaagtacactaagatattgtgagagagaaagagagagtgagagagaccacatttacataacttttattacagtatattgtcataattattctattttattattgttgctagtctcttacagtgcccaatttataaattaaactatatcataggtatgtatgtataggaaaaaacatagtatatatagggtttgggactatcagagatttcaagcatccactgggcttcttggaatgtattacccacagataaacagggtctact

SEQ ID NO: 4013 - DNA, 268 bp, Homo sapiens
  source 1..268: mol_type = other DNA
gccaagcacagtggcttatgcctataatgccagcactttgggaggccagggtgggcagatcacctgaggagttcgagaccagcctaggcaacatgcaaaaccccatctctactaaaaatacaaaaattaactgggcgtggtggcgcatgctggtagtcccagctactcgggaggctgaagcatgaaaatcacttgagcccaggaggcgaagtttgcagtaagtgaagatcatgccattacactcccacctggacaacaaagtgagact

SEQ ID NO: 4014 - DNA, 307 bp, Homo sapiens
  source 1..307: mol_type = other DNA
gctgggtgcggtggctcacacctgtaatcccagcactttgggaggctgaggcaggcggatcacgaggtcaggaggtcgagaccgtcctggctgacacggtgaaaccccgtctctactaaaaatacaaaaaattagccagggtcggtggcgggcgcctgtagtcccagctactcgggagactgaggctggagaatggcgtggaacccgggaggcggagcttgcagtgagccgagttcgtaccactgcactccagcctgggcgacagagcgagactcagtctcaaaaaaaaaaaaaaaaaaaaaaagaa

SEQ ID NO: 4015 - DNA, 303 bp, Homo sapiens
  source 1..303: mol_type = other DNA
ggccgggtgcagtggcccatgcctgtaatcccagcactttgggaggctgaggcgggtggatcacttgaggtcaggagttcaagaccagcctggccaccatggtgaaactccgtctcgaccaaaaaaatacaaaaattagccaggcgtggtggtgcatacctgcagtcccagctattctggaggctgaggtggtagaaatgcttgaactcagggtgcagaggttgcagtgagctgagatcacacctctgcactccagactaggcaacagagtgagatgttgtctcaaaaaaaaaaaaaaaaaga

SEQ ID NO: 4016 - DNA, 92 bp, Homo sapiens
  source 1..92: mol_type = other DNA
ctttgtctataaggtttgcaatgtggccctagtatcttccagggtacctaacacattgcagatattcatggtatgtttgttaaataaatgaa

SEQ ID NO: 4017 - DNA, 300 bp, Homo sapiens
  source 1..300: mol_type = other DNA
gccggttgcggtggctcatgcctgtaatcctagcactttgggaggctgaggtgggtggatcacctgaggtcaggagttcgagaccagcctcgccaacatggcgaaaccccatctctactaaaaatacaaaagttagctgggtgtggtggcagaggcctgtaatcccagctccttgggaggctgaggcgggagaattgcttgaacccggggacggaggttgcagtgagccgagatcgcactgctgtacccagcctgggccacagtgcaagactccatctcaaaaaaaaaagaaaagaaaaa

SEQ ID NO: 4018 - DNA, 112 bp, Homo sapiens
  source 1..112: mol_type = other DNA
cgggcatggtgcatgcctgtaatcccagccactcaggaggctgaggcagggaggatccattgagcccaggagtccagcctgggcaaaatagcgagagaccctgaatctgaaa

SEQ ID NO: 4019 - DNA, 301 bp, Homo sapiens
  source 1..301: mol_type = other DNA
ccaggcacggtggctcacacctgtaatcccagcactttgggaggccgaggcgggcagatcacctgaggtcaggagttcgagaccagcgtggccaacatggtgaaaccccgtctctactaaagataaaaaaattagctgggtgtgttggtgggtgcctgtaatccagctactcgggaggctgaggcaggagaatcacttgaacccaggaggcagaggttgcagtgagctgagattgcgccactgtactccagcctgggcaacaaagcaagactctgtctcaaaaaaataaaaataaaaaaaa

SEQ ID NO: 4020 - DNA, 127 bp, Homo sapiens
  source 1..127: mol_type = other DNA
tacatgggaggctgaggccggagaattgcttgaacccaggaagtggaggtttcagtgagctgagatcgcaccactgcactccagcctgccaaactgcatctcaaaaaaaaaaaaaacaaaaacaaaa

SEQ ID NO: 4021 - DNA, 310 bp, Homo sapiens
  source 1..310: mol_type = other DNA
gctgggcacagtggctcacgcctgtaatcccagcactttgggaagctgagacaggcagattatctgaagtcaggacttcaaggccagcctggccaacatggtgaaatcccctctctactaaaaatacaaaaattagccaggcatggtggcaggcaactgtaatcccaactacttgggaggctgagacaggagaatcacttgaacccgggaggcagaggctgcagtgagctgagattgtaccacttcacaccagcctgggtgacagagtgagactctgtcttggaaaaaaaaaaaaaaaaaaaaaaaaaaa

SEQ ID NO: 4022 - DNA, 220 bp, Homo sapiens
  source 1..220: mol_type = other DNA
gagatctgatggttttaaaaagaggagctcccctgcatgagatctcactttttgcctgctaccatttatgtaagatgtgacttgctccttcttgccttccatcatgactgtgaagcttccccagccatatggaattgtaagttcaattaaacttcttttctttgtaaattacccagtctcgggtatgtctttatcggcagcatgaaaacggactaataca

SEQ ID NO: 4023 - DNA, 1545 bp, Homo sapiens
  source 1..1545: mol_type = other DNA
taaattggtaccaggagtgggatgttctgaaaagatatctgaaaatgtggaaacgactttggaactgggtaataggcagaggttggaacagttttgagggctcagaaaaagacaggaaaatgtggaaaagcttggaactttctagagacttgttgaatggctttgccaaaaatgctgataatgatatggacaataagacccaggctgacgtggtctccgatggagctgaggaacttactgggaactggagcaaaggtgactcttgttatgttttagcaaagcgactggcagcattttgcccctgccctagagatgtgtggaactttgaacttgagagagatgatttagggtatctggcagaagaaatttctaagcagcaaagcattcaagaggtgacttgggtgctgttgaaagcattcagttttaaaaggaaaacagaggatagaagtttgaaaaatttgcagcctggcaatgcgatagaaaattgcattttctgaatagaaattcaagccagctgcagaaatttgcataaggaaggaggagccaaatgttaatccccaagacaatggggaaaatgtctccaggccatgtcagaggccttcacggcagtccctcccatcacaggcccagaagcctaggaggaaaaagtggtttcatgggctgggcccagggtccccaagctatgtgcagcctggggtttggtccactgcatcccagctgccccagctgtggctgaaaggggacaatgtagagctcgggccctggctttagatggtgcaagccccatgccttgtggtgttgagcttccatgtggtgttgagcctgcaggtgcacagaagtcaagaattgaggttttggaacctccacctagatttcagaagatgtatggaaatgcctggatgcccaggcagaaatttgctgcaagggtggggctctcatggagaacctctgctagggcagtgcagaagggaaatgtggggtcggatcccccacacagagtccctactggggcactgtcctccagacccagaatggtagatccactgacagcttgcactgtgtgcctggaaaagccacagacactcaatgccagcctatgaaagcaaccaggagggagactgtaccctgcaaagccacaggggcagagctgctcaagaccatgggaacctacctcttgtatcagcatgacctggatgtgagacatggagtcaaaggagaacattttggagctctaagatttgactgccctgctggattttggacttgcatggggcctgtagcccctttgttttggccagtttctcccatttggaatggctatatttacccaatgcctatacccccattgtatccaggaagtaactaacctgcttttgattttacaggctcataggtggaagggacttgccttgtctcagatgagactttagactgtggacttttgagttaatgctgaaatgagttaagactttgggggactgttagaaaggcatgattggttttgaaatgcgagatcatgagatttgggaggggccaggggcagaa

SEQ ID NO: 4024 - DNA, 354 bp, Homo sapiens
  source 1..354: mol_type = other DNA
gatatggtttggctgtgtccccatccgaatctcatcttgaatttctgtgtgttgtgggagggacaggtgggaggtcattgaatgatgggggcaagtcttttctgtactgttcttgtgatagtgaataagtctcatgagatctgatggttttaaaaagaggagtttccctgctcaagctctctctctttgcctgctgccatccctgtaagatgtgacttgctcctccttgccatctgccatgatgtgaggcttccccagccacgtggaactgtaagtccaattaaacctcttttctttgtaaattatccagtcttgggtacgtctttatcagcagcgtgaaaacagactaatgca

SEQ ID NO: 4025 - DNA, 275 bp, Homo sapiens
  source 1..275: mol_type = other DNA
gctgggtatggtggcttacgactgtaatcccagcactttgggaggccagggctggaggatcgcttgagaccagtctgggcaacatagtgagactctacaacatttttttttttttaatttgctgtgcatggtggtacacacttgtattcccagctacttgggaggctgaagtgggaggatggtctgagccccagaggaccagactgcagtgagctatcatcacaccactatatctagcctgggtgacagagtaagaccctgtctcaaaaaaagaa

SEQ ID NO: 4026 - DNA, 307 bp, Homo sapiens
  source 1..307: mol_type = other DNA
cgagatgcatctatctgcagtgaaatggaaaattcaccaagatatgtcaagtgaacaaaaaaagcaaggttcaaaacaacgtcaagatctcatttacataaaaagcaaaacaaaattaaacaatctccccagcttgtttttatttgtataaaatataacatgcacataaatggtgtgcaaagacaaatacccatgtgtaaacagtggtaacctcaaggttcatgggagaagagacaggaatggggtgggctggtaagattggtgtgaaagtgaactttaatactgtatcctgctgtactgtctaatt

SEQ ID NO: 4027 - DNA, 226 bp, Homo sapiens
  source 1..226: mol_type = other DNA
ttctgttcaggttatggcattgaaaaaggtaagtccaattaaggaaggtgtgaaacaaatataagatgtttacatgttaaaaatgaaaagatgaaattacttatttacagatcttttgtctacctagaaaatccaagaaaatgcactaagaatttattaaaattaatgtaatcaaagtagctgcatacaataaatatttcagaattaatagattctcattatatca

SEQ ID NO: 4028 - DNA, 307 bp, Homo sapiens
  source 1..307: mol_type = other DNA
ggccaggtgcagtggctcacgcctgtaatcccagcactttgggaggccaaggcaggcggatcacttgagtacaggagttcaagaccagcccgggcaacatggcaaaaccctatctctacaaaaaatgcaaaaattagccagggatggtggtgccaggcatgtagtcccagctacttgagaggctgaggcagaaggatcatttgagcccaggatgcggagtttgcagtgagccgagatcacgccattgcactctagcctgggtgacagagggagaccctgtctcaaaaaaaaaaaaaaaaaaaaaaaa

SEQ ID NO: 4029 - DNA, 406 bp, Homo sapiens
  source 1..406: mol_type = other DNA
ccaataatagaaaaatattttttcagtgcatataaaaaatttaccaagataagccatatttgaggccataaatcaatcctcaataaatataaaagaattagagtcatacaaagtatgttctctaaccataatggaattaaattaggaatcaacaaaggaaaatatctgcaaaactcccaaatatcaggaagtaaagtaatacatacctaagtaactgatgggtcaaagaacaaatcaaaagggaaattaggaagtgtttctaactgaatgaaaatgaaagtacatcaaaatttgtggaatgttgctaaagcagcactaaaggaaatgtataacactaaacattcctattaataaaagaaggtctcaaataaaagacttcagcttccatttcaagaatcaagaaaca

SEQ ID NO: 4030 - DNA, 1279 bp, Homo sapiens
  source 1..1279: mol_type = other DNA
aataatggacttccatttctagccaatatgtaataacaagtataagatttacctacctgcctgaaacaaacaaacaaaaaaagcagagaaaatacatgaaatgatggtttcaaagacactgcacattaggcaatgaagaacagcaatccctgagagacagaaaacaagtgaagtaagttctgtgaatgcttctgcttactgccttgagaatatttccaaggtgcagtttaatgaaggaggaacccaagtagagcccagggctatcttcgttgaagagattgagctgagagtctgggaaggccaaggcagagacagtgtgcaggatggagtactggaaaacgcgctgcatgctgggagcacctggagctctgcagtgggctcctcttaagtactcagtggggtactgaccagtgagtgcatgtaggaactacttagaaaactagagggaacactaactggcactcaaacagaacaagaacaatgcctgttcccaccagccaaactggaaaaccccgtaattaacaaggcacgaggtagagtattccaaggatcctggggagtaactaccctagatggaaaactgctctggccccacctaacaaatatttttttttctccccctcttctctctatgtttttgaaacaaatcttaaggaaaggattcaactgtattaataaattaactgtgacacagaacaaataaaaaaaaaatccagtacctaaacaggtaaaattcacaatgtttataatccacaaaaatttatcaaacatgcaaagaaaatatgacccatgaagaagaaaaaaatcaatcaactgaagctaacaaaattgacatatatgttagaattagcagacaagggaattaacaaagttattccatattcaaaaagctaagtagaaacatgggagaaagaaaataaggcctaaatccaacttctacagataaaaagaataatgtctaatatgaaaaatgcattggataagactgatggcagatcagacaaaacataagagatgagtgaactagaagacacataataaaaactacccaaagtaaaccagagtggaaaaagaataaaaagaccatgagtgaattctgggaacactttaagcagtttaatatacatgtaactagagttcccagaagtaaagagaggataaacagggatatttaaagaaatagtggccaaatttttccaaatttgatattgacaataaactcatagatctaagatgctaaatgaaccataagaacaaaaaacacaagaaaaatgcacca

SEQ ID NO: 4031 - DNA, 135 bp, Homo sapiens
  source 1..135: mol_type = other DNA
gccaggcacggtagcacacacctgtggttccagctactcaggaagctgaggcaggaggattgcttgagcccaggagtttgagaccagcctgggcaacatagtgaaaccctgtctctaagggtgaaaagaaaagaa

SEQ ID NO: 4032 - DNA, 132 bp, Homo sapiens
  source 1..132: mol_type = other DNA
ccgggcatggtgtcctgtaataccagcactttgggaggctgagtcgggaggatcgcttgggcccaggagttcgagaccagcctaggcaacatagggtgaccacccacccccgtttctaaaagtaaaaaaaga

SEQ ID NO: 4033 - DNA, 546 bp, Homo sapiens
  source 1..546: mol_type = other DNA
ccactttacaaagtagtctatcagtcctcaaatagttaaacatattatccagcaatttcactcctaggtatatacccaagagaaatgcaaacatgtctacacaaatacttgtgcacaaatatttataacactcataatagccaaaagacagcaataacccaaatgtctattatctgacaaataatgtggtttatctacacaatgaaatattattcagccataagaacttccgatacatgcaacacggatcaaccttgaaaacattatgcaaagtgaaaaaaaaaacagtcacaaaagaccacatattatataattacgtttctaagaagtgtccagaaaagacaaatccacagaaacaaaaagcagattcgtggttgcctagggcgaatagttaaagggtacacatttatttttgaggtgatgaaaatgttctaaaattgactgtggtgatggctgcatataactgaatgtattaaaaactactgaattacacactttaaatgggtgatttgcatgtctgtgaattataattcagtgaaactgtta

SEQ ID NO: 4034 - DNA, 301 bp, Homo sapiens
  source 1..301: mol_type = other DNA
gctgggcgcagtggctcgcacctataatcccagcactttgggaggccgaggtgggtggatcacctgaggtcaggagttcgggaccagcctggccaacatggtgaaaccctgtctctactaaaaatacaaaaattagctgggcgtggtggtgcatgcctgtaatcccagctactcaggaggctgaggcaggagaattgcttgagcctgggaggcagaagttgtagtgagctaagatcgtgccactgcactccagtctgcgttgacagagaccctctctaaaaaaaaaaaagactgaaaaaaa

SEQ ID NO: 4035 - DNA, 126 bp, Homo sapiens
  source 1..126: mol_type = other DNA
atattttaaagcaaaggtgttggccgcttgccagggaagtagaaggaattcataaatcacttatgggtcagactgcatggcccagactgcatggcctctgaggttccagccatattgaacattctg

SEQ ID NO: 4036 - DNA, 290 bp, Homo sapiens
  source 1..290: mol_type = other DNA
gctgggcacagtggctcacgcctgtaatttgagcactttgggaggccaaggtgggcgaatcatatgaggtcaggagtttagagaccagcctggccaacatgatgaaaccccgtgtctactaaaaatacaaaaattagccagtaattccagctactcaggaggctgaggcacaagaattgcttgagcccaggaagcggaggttgcagtgaactgagatcatgccactgcacttcagcctgggcacagagtgagactccgtctcaaaaaaaaaaaaagaaaaaaaaaaagaa

SEQ ID NO: 4037 - DNA, 252 bp, Homo sapiens
  source 1..252: mol_type = other DNA
gccgggtgcagtggctcacgcctgtaatcccagcactttgggaggctgaggcaggtggatcacctgaggttgggagttcaagactagcctggccaacatggtgaaacactgtgtcttctaaaaaaaaaaaaaaaaaaaaaaaaatacaaaattagccgggcgtggtggcccatgcttgtaatcccagctacttgggaggctgaggtaggagaatcacttgaacccaggaggcagaggttgtggtaagccgag

SEQ ID NO: 4038 - DNA, 260 bp, Homo sapiens
  source 1..260: mol_type = other DNA
gccgggtgcagtggctcacacttgtaattccagcattttgggaggctgaggctggcagatcacttgaggtcaggagtttgagaccagcctggccaagatggtgaaaccccgtctctactaaaaatttttgtaaaaatacaaaaattagctgggcgtagtggcacatgcctgtaatcctggaggtttcagtgagccaaaatcacgccactgcactctaacctgggtgacagagtgagtttccgtctcaaaaaaagaaaaaa

SEQ ID NO: 4039 - DNA, 305 bp, Homo sapiens
  source 1..305: mol_type = other DNA
gctgggcacggtggctcatgcctgtaatcccagcacttcaggggactgagacaggtggatcatttgaggtcaggagtttgataccagcctcgccaacatggtgaaaccccatctctactaaaaatgcaaaaagtagctgggcgtggtggcaggtgcctgtgatcccagctacttgggaggctgaggcagtagaatcacttgagcccgggaggtggaggatgcagtgagccgagatcaggccacactgcactccagcctgggtgacaagagtgaaataattctgtctaaaaaaaaaaaaaaaaaaa

SEQ ID NO: 4040 - DNA, 6446 bp, Homo sapiens
  source 1..6446: mol_type = other DNA
gtggctggcaagatggccgaataggaacagctctggtctccagctcccagcgagatcaacgtggaaggcgggtgatttctgcatttccaaccgaggtacccggctcttctcactgggactggttagacagtgggtgcagcccctggaggtcaagttgaagcaggatggggcattgcctcaccagggaagtgcaaggggttggggaactccctcccctagccaagggaagctataagggactgcaccttgaggaatggtgcacttcagcccagatactacgcttttcccatggtcttcaaacctgcagaccaggagattccctctggtgcctacgccaccagggccctgggtttcaaggacaaaactgggcggccgtttgggcagacaccgagctagctgcaggagttttttttttcatacctcagtggcgcctggaatgccagcgagacagaactgttcactcttctggaaagggggctgaagccagggagccaagtggtctagctcagtggatcccacccccacggagcccagcaagctaagatccactggcttgaaattcttgctgccagcacagcagtctgaagttgacctgggatacttgagcttggtgtggggggaggggtgtctgccattactgaggcttgagtaggtggttttccgctcacagtataaacaaaggtgcccagaagtttgaactgggcggaacccactgcagctcggcaaagcctctgtagccagaccgcctctctagattcctcctctctgggcagggcatctctgaaagaaaggcagcagccccagttaggggcttttggataaaactcccatctccctgggacagagcacctgggggaaggggcggctgtgggcacagtttcagtagacttgaacgttcctgcctgctggctctgaagaggacagcagatctcccagaacagtgctcaagctctcctaagggtcagactacctcctcaagtgggtccctgacccctgtgcctccttactgggagatacctcccagcaggggtcaacagacacctcatacaggagagctccagctggcatctggcaggagcccctctgggacaaagcttccagaggaaggaacaggcggcaatctttgctgttctgcggcctctgctggtgatacccaggcaaacagggtctggagtggacctccagcaaattccagcagacctgcagcagagggtcctgactgttagaaggaaaactaacaaacagaaaggaatagcatcaacatcaacaaaaaggacatccacacagaaaccccatctgaaggtcaccaacatcaaagaccaaagatagataaatccacgaggctgaggaaaaaccagtgcaaaaaggctgaaaattccaaaaaccagaatgcctcttctccaaaggatcacaactccttgccaacaagggaacaaaactggacagataatgagtttgacaaattggcagaagtaggcttcagagggtaggtaataacaaactcctcagagctaacggagcatgttctaacccaatgtaaggaagctaagaaccttgaaaaaaggttagaggagttgctaagtagaataaccagcttagaaagaaaataaataacctgatgtagctgaaaaacacagcatgagaacatcgtgaagcatacacaagtatcaatagccaaattgatcaagtggaagaaaggatatcggagattgaagataaatctaatgaaataaagtgtgaagacaagattagagaagaaagaatgaaaaggaatgaaaaaagcctccaagaaatatgggactatgtcaaaagaccaaacctacgtttgattggcgtacctgaaagtgatggggagaatggaaccaagttggaaaacactcttcaggatattatccagaagaacttccccaacctagcaagacaggccaacattcaaattcaggaaatacagagaatatcacaaagatactcctcgagaagagcaaccccacaacacataattgtcagattcaccaacgttgaaatgaaggaaaaaatgttaagggcagccagagagaaaggtcgggttactcacaaagggaagcccatcagactaacagtggatctctctgcagaaaccctacaagccagaagagagtgggggccaatattcaacattcttaaagaaaagaattttcagcccggaattttatatccagacaaactaaccttcataagtgaaggagaaataaaatcctttacagagaagcaaatcctgagagattatgtcaccaccaggcctgcctttcaagagctcctgaaaggagcactaaatatggaaaggaaaaacaagtgtcagccactgcaaaaacataccaaatggtaaagaccattgacactatgaagaaactgcatcaactaatgggcaaaatagccagctagcatcataatgaaaggatcaaattcacatataacaatatcaaccttaaatgtaaactggctaaatgccccagtggaaagacacagactggcaaattggataaggagtcaagatccattggtgtactgtattcaggagactgatctcacatgcagagacacacataggcttaaaataaagggatggaagaatatttaccaagcaaatgaaagcaaaaaaaaaaaaaaaaaaaaaccggttgcaatcctagtctctgataaaacagactttaaaccaacaaagatcaaaagagacaaagaaaggcattacataatggtaaagggatcaatgcaacaagaagagctaactatcctaaatatatgaaatataaatgcacccaatgcaggagcacccagattcataaagcaagttcttagagacctacaaagagacctagactcccacacaataatagtgggagtcttttaacaccccactgtcagtattagacagatcaacgaaacagaaaattaacaaggatattcaggacttgaactcagctctggatcaagcggacctaatagaaatctacagaactctccaccccaaatcaacggaatatacattcttctccacaccacattggacatattctaaaattgtccacataattggaagtaaaacactcctcagcaaatgcaaaagaacagaaatcataagaaacagttgctcagaccatggtgcaatccaattagaattcaggattaagaaactcactcaaaccatacaactacatggaaactgaacaacctgcccctgaatgactactgggtaaataatgaaattaaggcagaaataaataagttctttgaaaccaatcagatcaaagatacaacgtaacataatctctgggacacagctaaagcagtgtttagagggaaatttatagcactaaatgcccacaggagaaagcaggaaagatctaaaatctacaccccaatatcacaattaaaagaactagagaagctagagcaaacaaattcaaaagctagcagaagacaagaaataactaagagcagagcagaactgaaggagatagagacacaaaaaatccttcaaaaaatcaatgaatccaggagctggttttttgaaaagattagcaaaatagatggactgctagccagactaataaagaagagagaagaatcaaatagacacaataaaaaatgataaaagatatcaccactgatcccacagaaatacaaactaccataacagaatactataaacacctctatgcaaataaactagaaaacctagaagaaatggataaattcctggacacacacaccctcccgagactaaatcaggaagaagttgaatccctgaatagaccaataacaagttctgaaattgtggcagtaattaatagcctaccaaccaaaaaaagcccaggaccagacaggttcacagccgaattctaccagaggtacaaaaagcagctggtactattccttctgaaactgctccaaacaatagaaaaagagggactcctccctaactcattttatgaggccagcatcatcctgataccaaaacctggcagagacacaacaaaaaaagaaaatttcaggccaataaccctgatgaacatcgatgcgaaaatcctcaataaaatacgggcaaaccgaatccagcagcacatcaaaaagcttatctagtatgatcaagttggcttcatccctgggatgcaaggctggttcagcatacacaaatcaacaaatgtaatccatcacataaacagagccaatgacaaaaaccacatgattatctcaatagatgcagaaaaggcctttgataaaattaaacaccccttcatgctaaaaattctcaaaaaactaggtgttgatggaacgtatctcaaaataataagagctatttatgacaaacccacagccaatatcatactgaatgggcaaaagctggcagcattccctttgaaaacaggcacaagacaaggatgccctctctcaccactcctattcaacatattattggaagttctggctagggctattaagcaagagaaagcaataaaggtattcagataggaggaagtcagattgtctctgtttgcagatgacatgattgtatatttggaaaaccccatcatctcagcccgaaatctccttaagctgataagcaacttcagcaaagtctcagggtacaaaatcagtgtgcaaaaatcacaggcattcctatatatcaataatagacaaacagccaaatcatgagtgaactcccattcacaattgctacaaagaataaaatacctaggaattcaacttataagggatgggaaggacctcttcaaggagaactacaaactacttctcaaggaaataagagaggacacaaacaaatggaaaaacattccatgctcatggataggaagaatcaatactgtgaaaatggccatactgcccaaagtaatgtgtagaatcagtgctatccccattaagctcccattggctttcttcacataattagaaaaaaactactttaaatttcatatggaaccaaaaaagatcccacatagccaagacaatcctaagcaaaaagaacaaagctggaggcatcacgctacctgacttcaaactatactacaaggatacagtaaccaaaacagcgtgatactggtatcaaaacagatacatagaccaacggaaaagaacagaggcctcagaaataacaccacacatttacaaccatctgatctttgacaaacctgacaaaaacaagcaatggggaaaggattccctatttaataaatgatgttgggaaaactggctagctatatgcagaaaactcaaactggacccctttcttacaccttatacaaaaattaactcaaaatggattaaagacttaaatgtaagacctaaaaccataaaaaccctagaagaaaacctcggtaataccattcaggacataggcatgggcaaagacttcatgactaaaacaccaaaagcaatggcaacaaaagccaaaatagacaaatgggatctaattaaactaaagagcttctgcacaatgaaagaaactatcatcagagtgaacaggcaacctacagaatgggagaaaatttttgcagtctatccatctgacaaagggctgatatctagaatctaccaagaacttaaatttgcaagaaaaaaaccaccccatcaaaaagtgggtgaaggatatgaacagacacttctcaaaagaagagattatgaaataaagctcatcatcactggtcattagagaaatgcaaatcaaaaccacaatgagataccatctcatgccacttagagtggcgatcattaaaaagtcaggaaacaacagatgctggagaggatgtggagaaataggaatgcctttacactgttggtgggagtgtaaattagttcaaccattgtggaagacagtgtggcgattcctcaaggatctagaaccagaaatacctttagagccagtaatcgcattactgggtatatatccaaaggattataaatcattctgctataaagacacatgcacatgtatgtttattgcagcactgttcacaatagcaaacacttggaaccagcccaaatgcccgtcaatgatagattggataaagaaaatgtggcacatatacaccatgtaatactatgcagccataaaaaaggatgagttcatgtcctttgcagggacatggataaagctggaaaccatcattctcagcaaactaacacgggaacagaaaaccaaacactgcatgttctcactcataggtgggagttgaacagtgagaacacatggacacagggagaggaacatcacacaccggggcctgtctcggggtggggggctagaggagggatatcattaggagaagtacctaatgtagatgacaggttgatgggtgcagcaaaccaccatggcacatgtatacctgtgtaacaaacctgcatgttccgcacatgtatcccagaacttaaagtataataataataaaaaa

SEQ ID NO: 4041 - DNA, 384 bp, Homo sapiens
  source 1..384: mol_type = other DNA
taagaaaatgtggcacatatacaccatggaatactatgcagccataaaaaatgatgagttcatgtcctttgtagggacatggatgaaattggaaaccatcattctcagcaaactatcgcaagaacaaaaaaccaaacaccgcatattctcactcataggtgggaattgaacaatgagatcacatggacacaggaaggggaatatcacactctggggactgtggtggggtcgggggaggggggagggatagcattgggagatatacctaatgctagatgacacgttagtgggtgcagcgcaccagcatggcacatgtatacatatgtaactaacctgcacaatgtgcacatgtaccctaaaacttagagtataataaaaaaaaaa

SEQ ID NO: 4042 - DNA, 230 bp, Homo sapiens
  source 1..230: mol_type = other DNA
cagtaaaacactatagttaaagaccacagactgtggagcctgactaccttgattcaaattctggttccatctagctgtgtgaccttaggcaagtttaaacttctccctacctgcttccaacatctggcaaacggagattcctcttgggattgcggtaaggattaaatgagttgatacacttaaaaatgttcataagagagcctagcaaatggacggcacatcataaatgt

SEQ ID NO: 4043 - DNA, 3052 bp, Homo sapiens
  source 1..3052: mol_type = other DNA
gatttctgcttttgaatatgacggaatagtctgtagcagatcaacactccctcttaaactagaaaaactgtattaaatagggagaaagttcttaaaatatcagactttctgaggtagctaagacttgaggtggcaagaaactcactgaagggtatctgacattctgtgcagctttccctttcaagacatgtcacctatttctttaatggcacaggccaaggggctaagaagccaaaaaaggacagccactaggaggcagagaagtcagcaaagcttttggcaatttcatgggagtagggggacaaaacttggtagctaagtcttgaggagtcaagatcccctagtgaaagaaggcacagaagaacaaatgtgacactcagtactgattttcctcttaagggatttatcagcttttaaactgcacatagcaaaaggctaaaaagccagcagaaagcaattaaaaaggaagaaggagcttttaaaactctcatgggtctggaaagaaaaaaagccagagaagccctaaaaatacccaatctcttaattgagatctctagggggctaccaagttggaagcaaactacaggtagaacaaggtttataaggctgaaaacccaacctcaagtcagctcagtccttgacagttgcagtgatctctatctgcctgcaagaagatgggtgaatctgaagacatgtgaatcctatctggggaaatgtatcattatagatacaaaatttgtatctaaaattctgcatataatgtctggcactccatcaaaaaattgcctaataataattattactattatgttattatccacatgtaataatttatataatatacaatagaatatataattaacatacattaatatacaaatatattaactattattattatttggcctaacaagatgcaaaatcaaaaggaaagagatgatggaaataggcctataggtgatacagatattgaagttttcagacacagactttaaagcaatttgattaatatgctcaaaaaatacatgacaagagattttcacataattagaatctatcttaaaaagagaggatgaaataattctaaaactaaaaaatactataactaaaattaagaatagatggggttaaaaagcagattggacatagttaaattcagaataagtgaactgaaatacagtcaagtaaaaactatccagaacggataagaggaggaaaaaaatcataaaaataacagaagagagcaggagacatatgggggataaaaagtataataaagatttaattggagtcacagagcaaaggagacaaaaatggggcagaaacaatatttttaaaaagtcaaaattttttcacagctgatcagtcatactacaaattcaagaggtgccagaaacgccaaacagggtacaaacaaaaccattcttaggtgcatcactgaaagctgtttaaacttaaagaaaaagagaatgacaaaaagaaaggcagctgaacaagaaagtcatactaccttccaagaagcaacagtaagtctgacggctgattttgcaacagaaacaatggaagctagaagacaatgaactgagatctttaaagtgcttcaagaaaataacagctaataatgtagaactgtacagtcatttaatatattcttcaaagatgaaaataaataaatttcaaacaagcaaaaactgagaattcagtaccaccaaactccctaaaaggagttcttcagacagaggaaaattaatctcagatggaagcatgtaaatacaaaaggaaataaagaacaatggaaagggtaaatattaactgtacaaaacaacagtctctggatttaaatgtagacgtgaaatgcatgacaatgacaacataaaagcaggagagtgataaatgctattaaagttttctagggtcctaacaatgtctgagatgttgtttttcaaaatcctaatgaatatgcaactctaatgtaccacaagaaagcttgtggtgatctagcgtaaccaccaaaagaacagtaacagaatatataactaacaagctaacaaagggaggaataaaataatatttttaaaacacttgattaatccaaaagaaggcaacaatggagagaaaatagaatatagaacaagtaggacaaacagaaaacaataaaatgacagacataaacccaaatttatcaataattatatttaccattaatgagctaaatatatttcagatttaattaaaaacaggcaaacaaaaatctgtttattcttaacaagaaacagaccccaaatataaagctacaggagcattaaaagcaaaaaggagagagaaagttttaccatgcaagcaaacagcagccaaaataaagcaggtgtagctaagaagactttgaggcgagagacaagtgttactagagataaaaagggacatgttataatgataaagagccaatgtactagaaagataagtttgtatgtgcctagtaatatgacttcaaaatacataaagcatacagtttagttctttatagaactaaaaggagaaatatacaaatccacaatcacagtaagacacatttgacacttaacctcaagacacctctctctgtaatgaatagaaaaaaaggcaaaaaaaaaaaaattcagtaaggatagagaagatttgtacaacacaataacacaatttacaaacttgaacttaacaaagtacatagaagacagtagttaacagcagaatgcatagtcttttcaagggtacataaacatttataaaaatgctgagccataaaataagtatcaataaaggtctgaaactattcagagtgtgttctctaatcatagtgaaattaagaaattagtaacagaaagataactagcaaatccccaaacgttcaaaaagtaagcaatacatttgttaaaaaaaaaaaaaaacctacaggtcaaagaataagccaaaataaaatctgaaaaacatttttgcataaatgataatgaacatgtaacataccacaatttgtgggatacagctaaaatgtgttgagaggaaaccctatagtctt

SEQ ID NO: 4044 - DNA, 594 bp, Homo sapiens
  source 1..594: mol_type = other DNA
agctggaaccttaaagcaattcattctcaggataagaatgaaacagaagaagtccccacctcctagggaccgtggaaagaattgcattgacactcagtagaggaagggaaaatgaggaagaaaactcgtctctgagaggttatagcttatgtattggtttttgttcacatttggtagtcagattctcattacttgactatccatgaaaccttgtggtatgattttagtttaaagtgattgtggatgaatagtacatttaaggttctcagcagaagcaaatgcagatcttctctgaaaatagttacctttattctaggcctcaggcattctccacaaatcattattagaggaaaattgagcagtacacactcaaagataactaagtatatagcagaaagtaagatactttaagaactagcagaacaaatggcagaaccccttccagaattttagatattagaattaaaattactgaaagatactggagttaagtcaactacttatatttaaagaaataaaagaaattggacactaaaaagtgatgtggcagatttgaaaaagaaccaaataaaacttctataaatgaaaaatata

SEQ ID NO: 4045 - DNA, 230 bp, Homo sapiens
  source 1..230: mol_type = other DNA
aatgaataagacctactatttgatagcacaataggctgactgtagtcaataataactatatatttttaagtaacgtaaggaatgtagttggattgtttgtaacttgaaggataaatgtttgaggttaggggtaccccattctccacgatgtgcgtatttcacattgcatccctgtatcaaaacatctcatgtaccctgtaaatatatacacctactgtgtgcccacaaaa

SEQ ID NO: 4046 - DNA, 443 bp, Homo sapiens
  source 1..443: mol_type = other DNA
tttttttcaaaagtgatggggccaagattcagaagactatgggaatctaaaaagaactactttggggccacttttctactgagtagcctaaagaagttctaagagattaagaagctgaaatagcacctttgacaaacccctggagccagggagttatagattagaagctagaatctggggtgtggtagggtggtagactcctcttgctctgggctgaagaccctgaagctatgtctgaagagtgagcgtgaaccagaaataatctggccctcacagggagtgaagtccagtttcatatcatcccggtacttgaaactggattaaaataatcaggaattggtagtatccctagcaatagacctacagtagaagatatacttttttaggaagctgataccctaggcatgtagttacttttagtttttcatatttggtgtctatca

SEQ ID NO: 4047 - DNA, 306 bp, Homo sapiens
  source 1..306: mol_type = other DNA
ctaggcacagtgactgtctcgtgactgtagttgcaacactttgggaagccaaagggggaggatcccttgatcccacaagttcaagaccagcctaggcagcatagtgagacccccatctctataagaaataaaaaaatcagctggatgtggtggtgtatgcctgtagtctcagctactcgagaggctgagtcagaaggattgcttgagcccaggattggaggctacagtgagccatcatcacaccactgcacacctgcctgggcaacaaagcgcaaccctgtcaaaaaaaaaaaaaaaaaaaaaaaa

SEQ ID NO: 4048 - DNA, 260 bp, Homo sapiens
  source 1..260: mol_type = other DNA
tcccctttgcagcccagcacctgccatgagaacaagctctggctagcctatataaaacagagccaggcagtcccagctgaaaccacactagaccagctgacagatagctgactcctagacaaatgaatgagcccggccaaaccaaaagaatgaccgagccaacttgtagactcatgagcaaataaatgcttattactatatgccactgaagttttttgagtgcttgtaatgtaataaacagtgtaaacgataactgaaac

SEQ ID NO: 4049 - DNA, 244 bp, Homo sapiens
  source 1..244: mol_type = other DNA
gttggtatggccatgaggaagcaggtgtcttacattctggttgaaatgtatttggtacagcctttttttttttttttaacagtactttatcattatctgttaaaatacaaaaaatatatttttttgactaagcattttactccacgaacttttcctactcatatacttttatagatccacaaaaaataagctatacagagatatttattgtagtattgtatgcaaggagaaaaaatctgaagac

SEQ ID NO: 4050 - DNA, 517 bp, Homo sapiens
  source 1..517: mol_type = other DNA
gtggcagacactgttgtttgctttcccaaaagtcattggccctttcttctgttaaccaaaccataattttgtttaatggcaagttgcctaaccccagggcatgaatggttaatcatgattagtctaaaccagtcattattatcctttggcaaattatttcactttaccttcctcccatgtgacacaattctggccaatgagacataaagaaagtctactggaggacatttgacaaaaatgtcttccctgatgacagtagagagatgctgaaagaattctttgcctccctgctttgggtgctctatataaggatgtgatgcttagagttggtattggcaagtttcaaaaatgagaaggcggccaagaaaattgcagaaagttaacctagcaccatgatttggttgaactctgaaacaatcttggagctgtctacttgcaaaattttgttacatgagctaattaatctactgttagttaggttttctgttacttggagctgaaaatatcctaacaaata

SEQ ID NO: 4051 - DNA, 306 bp, Homo sapiens
  source 1..306: mol_type = other DNA
gctgggcgcggtggctcacgcctgtaatcccagcactttgggaggccgaggcgggcggatcacgaggtcaggagatcgagaccatcctggctaatgcgatgaaaccccgtctctactaaaaatacaaaaaaattagccaggcttggtagtgggctcctgtagtcccagctactggggaggctgaggtagaattgcatgaacccgggatgcggagcttgcagtgagctgagatcgtgccactgcactgcagcctgggcgacagagcaagattccatctcaaaaaaaaaaaaaaaaaagaaaaaaaaa

SEQ ID NO: 4052 - DNA, 334 bp, Homo sapiens
  source 1..334: mol_type = other DNA
cagacctctttcccaaactctggattcaaatatccaacagtcacctcaacatcttaagttggctgtctcatagatatctcaaactgaacatttccaaatttaaactcctgaatgccagtcaggagtccccacaaaccagttccccacagaactttctcacttcagttgatagtaactccatccttccagtttttcaggccaaaacctttgagtcgtttctttcaaacactagatctaatctatcataaaattctgttggttctatctttaaaatatattaagaatctgctctattttacttctcactgctctactattactttgggctgagcta

SEQ ID NO: 4053 - DNA, 366 bp, Homo sapiens
  source 1..366: mol_type = other DNA
tgatatagtttggatttgcatccttgcccaaatctcatgttgaattgggggaggggtttggtgggggaccattggatcacaggggccaatttcccccttgctgttcttgtgatagtgagttctcatgagatctgatggtttaaacatgtgtggcatttcccccctcattgtcactctctctcctgccatcatgtgaaaaaggtgcttgcttgcccttcaccttctgccatgactgtaagtttactgaggactcccagtcatgcttcctgttaagcctgtgggcctgtgagtcaattaaatctcttttcttcataaattacccagtctcaggtagttctttacaacagtgtgagaacaggctaatac

SEQ ID NO: 4054 - DNA, 405 bp, Homo sapiens
  source 1..405: mol_type = other DNA
caagaaaaaaagtgaaaacataaattatccacatcacaaatgaaaagagggcatcagtttagaccctacatatattaaaagtaaagtgggtatggaaaacttcattgacaagccgcaacttgatgaaattgacaaatactttaaaagacacagtttaccaaaactgacacaagaagaaatagaaaatcttaaggaactccatatctactacagagattgaatttgtaataaaaaattttctaacaaaaaaaactctaggcccataatagcagtaaattttatcaaccattcaaagaaggaagaaaaaaatacaattttacatagactctcagaaattagaggaaggcaatacttcttaaatccttttataagccaggttaactttgatataaaatcccaacagaa

SEQ ID NO: 4055 - DNA, 1445 bp, Homo sapiens
  source 1..1445: mol_type = other DNA
tagaataaaataaaatcccaagagagacgttacaagcaaagaaaatcatggaccaatatttttcatgaacataaatgtaaaattcttaggaaaattttagttaattaggaatatattaaaaggttagtgtactatgactaagtggtggtttattctaggaatatatggctagtttaacatttgaaaaaaaattcagtgtaattcaccatgttaacagaatgaaggaggaaaaccatagatcatcttagtaagtgaagaaaagcatctaagaaaattcagactcattcataataaaaattcttagcaaactaggaataaaaagaaacttcttgaatctaaattcctaaaggacacctgtgaaaaacatacagctagggctattcttaaacatttaacccttttccctaagattgtgacaaggaaataatgtatattattagcccctctattcaacattctaccagaattacactagctagtgtaataaagaaaaagcaataaaaaacatatagattggataggagaaagtaaatttgtttgcatttgtaggtaacatgattatgtacattcgaaaccccatggtgtctacaaaacaatatactaggacaagtgaatttagcaagattacaaaaatacaaggtcaatagaaaaaaaaagcaattattagcaatttttatactagcagtgaacaattagaaaatgaaaagcatagtttatattagcatcagacatatcaaatgggtagaatgagtctgttgtaagaaattaaagaagaccttgataaatggagagatatatttatggattgaaacactaaaaattgtttaaagctgcccattttccccaaattggcctttattttaatgcagtgtaagtttggtctttgttgttgttgtcattgaggaaatagacaaactactataaaatttacatggaaatgcaaaggttttagactagccaaaacaattttgaaaaaagaaaaaattggaagctttatgctatctgatttcaggactctgtataaagccacaataatcaagacagtgtggtactggcttaaggatagacaaatggatcagtacaacagaatagagtccagaagtagacccatacgtatgtggtcagttgttttttgaccagggtaccaagtccaacggggaaaagaaagtttttaacaaatgatactgaataactggatatctcaaacctttctcactgtttactgaaacattaatttaagattgattacaggtctaaatataaaatccaaaagaataaggctttgggaagaaaacataggagattatcttcacaacattgggataggtaaagatttcttggacatgaactaaaggcagtaatcatcgaagaaaaatatggataaattggacttcaaaaaagttaaaatttctgctcattaaaggacttttaaaaacatagacatt

SEQ ID NO: 4056 - DNA, 288 bp, Homo sapiens
  source 1..288: mol_type = other DNA
gccgggcacagtggctcacacctataatcgtagcactttgggatgctgatgtttgagcccaccaggagtttgagccaagcctgggcaacatagtaagacctcgtctctacaaaaaaaaatttttaattagccaggtgtagtggtgtgcgcccatagtcctagctacctaggaggttgaagtgggaggatcacttgagcccaggaggtagaggctgcagtcagccaagatcatgccactgcactccagcctgggtgacagagagaaagactgtctttaaaaataaaaaa

SEQ ID NO: 4057 - DNA, 287 bp, Homo sapiens
  source 1..287: mol_type = other DNA
gccgggcgtggtggctcatgcctgtaatcccagcactttgggaggctgaggcaggaggatcacgaggtcaggagatcgagaccatcctggctaacacagtgaaaccccatctctactaaaaataccaaaaaattagcagggtgtggtggcgggcgcctgtagtcccagctactcaggaggctgaggcaggagaatggcggtaacccaggaggcagagctcgcagtgagccgagattgcgccactgcactccagcctgggcgacagagtgagactccgtctcaaaaaa

SEQ ID NO: 4058 - DNA, 164 bp, Homo sapiens
  source 1..164: mol_type = other DNA
gccgggcacggtggctcacgcctgtaatcccaactactcgggaggctgaggcagaattgcttgaacccaggagggggaggttgcagtgagccaagatcgtgccattgcactccagcctgggcgacagaggaagactccatctcaaaaaaaaaaaaaaaaaaaaa

SEQ ID NO: 4059 - DNA, 234 bp, Homo sapiens
  source 1..234: mol_type = other DNA
atagcctagtgattaggaggttggaatgtgagatggtggttgagagtcaggatctcttttaaaagtgatcttgagcaagttatttaaactttctaattatcagtttctttatctgtaaaatggaggtaatgggaatacttacctcaaattgctgagagaattaaatgaaataattctgcaagatagttatcacagtaaagcagtaaatgctccattcagggtaccattactatt

SEQ ID NO: 4060 - DNA, 117 bp, Homo sapiens
  source 1..117: mol_type = other DNA
ccaggtgcgataactcatgcttgtaatctcaacacttttggaggccgaggtgagatgatcatcttgagcccgagagttcaagattaaccagagtaacatagcaggatcttgtctcta

SEQ ID NO: 4061 - DNA, 1404 bp, Homo sapiens
  source 1..1404: mol_type = other DNA
agagaaagaactaagccattttagtacagtgcttagactgtatactttcagtgaggtatagtctacaaacaaaagcaaagaaatgttgagtttggttggtagtggtacatatatagcaaatctagaactcttatgtattttaagttgagcaaatgagtacatatgatgttgctgggagtcagggttttcttggtggaagaaaggagatatggaatggaataagagaaggaagaatcctctggggctttaagaaattagaattaacaataaaagcatgaactataatagtgtaaaacaatgtatgcatatgataggcatatatgcataggcctagaaacaatgacaccctggcaattagcacagctgttcttgtttggtttttaaataatagtcacagctaaaagaaagtaggactccagagctgtgtaaagatgaatttggatatataccagaaagtaaggaagtaccccaaaattaatgggtacatttcaaaaagacacagaagccagctcaaaaaggctctcactggtcaaatctaggacaatatgagtatcagaatgaatgatgacagtaatgagtataacattgagcaagagaagaatccctgagtacacagtgatgcgaacaaataagtaaaatgggaggaggggaagaaacagctcttctttacaatagaatgtcaacaactgtagaaggagtcatagagtcagaaaatcaccatcatataactgataattgtttcagcaagaatcatcaatgattgctaaattattggatgcagggctgtgggagaacaggatatttacacagtctcaaactatctccctatcaatagtttattaattacaaaggtagaaaagaacacctttaccttggagaaacttggcatataccaacttaagtagatgatcaaagttaacatcatcagtattgggataaactgataccacatgccttctgaggtgatgcactgaggacacacaatatcacttctgtagcattcttgccaaaactgcataaactgaatctgatcatgaagaaacaatcaggcaacccaaattcaacacattccactcataagtgttctgtactcttcaaaaatattcattaaagtcaaagagaggctgaggaactatttcaaactcaggagacttggaaactaaatgcagtgtgtgatcttggattggattttagattagtaggaaacatgactgtaaaaaagtgactgaaaaataactggtattattgggacatcaatgttaaatttcatgaatttaatatatattggttatgtaagttaatgttcttgttctgagctgaaattagtttgagcctatagggggcaaagctgtctaaaactcccaaatagttctgcaaaaagattttcagtggggtacacacatg

SEQ ID NO: 4062 - DNA, 306 bp, Homo sapiens
  source 1..306: mol_type = other DNA
gctgggcatagtgactcacgcctgtaatcccagacctttgggaggctgacacgggaagattgcttgagcccaggaatttcagaccagcctgggcaacacaggaagactccatctctacttaaaatatttttgttttttagccaggtgtggtggtatgtgcctgtagtcccagctacttgggaggctgaggtgggaggatcacttgaacccaggagtttggggtgcagtgagctatgattgcgacactgcactccagcctgggcaacagagcaagaccctgtctcaaaaaaaaaaaaaaaaaaagaa

SEQ ID NO: 4063 - DNA, 233 bp, Homo sapiens
  source 1..233: mol_type = other DNA
tatgggctctggagccaggagtcaggccctgcattcaaatcctgcctccagagcctgagacatgtggccttgggttagctctttatcctgtccggacctcagtttccttgagcgtccttagcaacgataagcatatctactttgtagggctgttctgagggttgaaagagttagcagatgtaaatcacgcagagcagcatccacacttggtaagcctgcagtcagtgttggct

SEQ ID NO: 4064 - DNA, 309 bp, Homo sapiens
  source 1..309: mol_type = other DNA
gccgggctcggtggctcacacctgtaatcccagcagtttgggaagccgaggcgggtggatcacatggtcaggagttcaagaccagcctggccaagatagtgaaaccccgtctctactataaatacaaaaattagctgggcacgatggcaggtgcctataatctcagctactcgggaggctgaggctggagaatcacttgaaccccggaggcggaggttgcagtgagctgagatcgcaccactgcactctagcctaggcgacagagcaagactccgtctcaaaaaaaaaaaggaaagaaaaagaaaaaaa

SEQ ID NO: 4065 - DNA, 128 bp, Homo sapiens
  source 1..128: mol_type = other DNA
ttccatgatttcttggctgtatgatatagggttggttgtttaatctatcttcatctttctaatgtggatagtagtagtggcagcaccaccagcagctatttcatagagttgctgaagattatttaagt

SEQ ID NO: 4066 - DNA, 302 bp, Homo sapiens
  source 1..302: mol_type = other DNA
gccgggcacggtggctcacacctgtaatcccagccctttgggaggctgaggtgggtgtatcacttgaggtcaggagttcaagaccaatctggccaacatggtgaaaccccatctctactaaaaatacgaaaattagctgggtgtgatggcgcatgcctgtaatcccagctacttgggaggctgaggcaggagaatcacttgaacccgggagatgaaggttgcagtgagctgaggtcgtgctactgcactcccgcctgggtgacagagtgagactctatctcaaaaaaaaaaaaaaaaaagaa

SEQ ID NO: 4067 - DNA, 43 bp, Homo sapiens
  source 1..43: mol_type = other DNA
gcatggcaatgttgagattcagggcatagttgttcaccacgct

SEQ ID NO: 4068 - DNA, 51 bp, Homo sapiens
  source 1..51: mol_type = other DNA
tagaatagtgcctgtcaatggtgactcaataatgatttcttgaatgataaa

SEQ ID NO: 4069 - DNA, 7076 bp, Homo sapiens
  source 1..7076: mol_type = other DNA
atatgttttaatgaaaataactaagggagagcaccagagtgcatgagaggagtaacagaaaccctggtgagtgcagaaactagggaaggccatatggaaaatggaaggaaacaccaggactccaccaccccatcctccaaccacggtcagctgggaatcaggaggaacttcttcctacagcaaggaagagaaagcaagaggatcccagtaacctccatcaacacattagacacctactgacttcaccactgaggtccctgcattccttacaggcacagtccttcctcacagctgaaggagctgcctggactccactagctgtgctccccccagagaaggagctgtcatcttggaactggaactacagcagaagtatgtcttgcaccaggggtgagtagctatagctccccttcatccctgagactaggctgctatggaaacaccccagggctggtggtccaacatcctcaaactgagctctctgaaactcaactgaagctgttacactctccctcccctttcacccttagggtggagcttaggtggtaccctacctcctgggaaaacagtaccttggctgctcagtgtagtcatgcctccccagtgcctaacttaaagcagtactctgtatcccaggaaatggtgccttggtcactcagagtggtcacgtaccccagtacctaagctggagtcgtgccctgtatcccagggaaatggtgcctgggccacccagaatagtcacagcccccagccctgagctgtagcagtacatttccccttggaggatcggtgccctggctgagctgagcagctgtgcatcccaggactgagctgacgtagtaccctgtgtcccaaggaaatagcaatggctgagctgagatgccccaccctacaggccaaacaactagagtattctgtttccctagagttgaactagccccttagagtctgagctgctgagataccccctccctggaaaatggagtcattgctctgctgggccctctagggcccagatgacagctgtagttcaccacactggggtacttgctgccaatgcacctggcctcacagagtctgtgatatactgaccctcactattccagggtctaaagtcactactacacagtgcttcatccactggaatctgggttatcactgagtcttattgcctcaggttcctgaattgcagccatatcctgcctgctgggcccaaacttccagagcgctccttcctccccagagtcaggccagtgctgagtccagcttagaagtagaattacagctacaacctggccccatgggatgcctcagattcacagatcctggctctgtggaggaacctacatccaactctgccatagagagtgaacatgcactggaagacccaggtaccacaatagtttcatgagtccttgagtctaagaccctggtcccacaaccactccaagcacctgcacctggaaccccacaccactgcagctgcttgtaggttgtgtcagtcttgacaacaagagggatctcttcagctaagtcttcccactatggggaaaacaaaaataggaagacctcaaaagcccttaacagtgaagagatgaacaacctttgctgctgctgccacaaacctctgcagcctataccactgaggcaaccacagttattgcttatgttgaatacagacaaaacttcatggagactataccactgcacctatccagaaacaagtcagcacatccttcccaaatggcacacagaaacccaactgtaggtgaaagtctccctacaagagccactgtggaaagtttggaagggacagtcattccaccagatgcacaggcatcaatgcagggacacaagcaacactaaaaagcaaggaaatatgacaccactaaagagccataatagctttctaataacagactcccatgaaaaggaaatcaacaaattgctggaaaaagaattcaatgagaaattgaggaaactcaatgagatacaagaaaatacagacagataattcagtgaaattaggaaaacagttcataatgtgaataagaaattcaacataaatagatataataaaaaagaaatatcacagctgaaacattcaatgaatgaaataaaaattacaataaagagctttgatggcagatttaagcagaagaaagaatctctgaacttaaagacaggtagtctgaaatactcagtaagaggaaaaaaaaaaagaatgaaaaacagtgaagaaaacctgcaagacatatgggacaccattaagcaaacaaatattcatatcatgggagttagagaaggagaagagaagggaaaggtatagaaaaccaatttcttgaaataatagctgaaaacttcccaagtccggggagacatatgagatccagatccaggaaactcaaagtttcccaaatagacttaactggaaaaaggtcctcaccaaggcacattacagtcatattgtcaaaagtcaagaacaaagaattctacaaacagcaagagaaaagcatcaagtcacacacaagggaatcatcattagactaacagcagatttctttgcagaaactttacaggctagaagagaatgggatgataaattcaaagtgcagaatgaaaaaaaattgccagtcaagaatatgagacccagcaaagctatccttcagataaataaagtctgtcatagacaagcaaaaactgaagtaatttatcaccactagactggtcttacaagaaataatctagggaatactacatttggaaggaaaaagataataatcactatcattaaaacatataaaagtataaaactcactggcagaacagatacacaaaagagagaaaagaattaaaccttatcagtatagaaaaccattaaatgacaatgataaacaataagagagaaggaaaggatcaatggatgtacaaaacaaccagaaaacaacaaaatataggagtatgtcctcacctattaataaaaaccttaaatgtaagtgaattaaattccccacttaaaagatatagactgaatggattttaaaaaccaactatatgctgcctacgggaaacttatttcaccataaagacacatttaggctgaactgaagggatggaaaaaatattccacacaaacagaaaccaaaagtgagcagaagtatctatacttatatcagataaaacagactttaagtcaaaaactgtaaacaagagacaaagaaggttataaggataaaggatcaactcaataagaagatataatgattgtgaatacatatgcaccccacactggagcacccagaaacataaagcaaatattattagatctaaagggagagatagaatttgatataataatatcaaagaggactttaacacatcactgtcatcactggacagatcatctagtcagaaaataaaaaagaaacattgaacttaaactgcactttagaacaaatgaacctaataaacatttaagaacatttcatccaacaggtgcagaatacacattccttccatcagcacatggaatatcctctaagacttacgttagggaacgaaataattttcaagaaatttaaaataactgaaataatatcaagtatcttttctgaccacaaaggaatgaaactagaagtcaataacaagaagaactttcaaaattgtatagttacatggaaattagacaacatacttctgaataactactgaagacagtaaaaaggaaattaaaaaatgtattgaaaccaatgtaaatagaaacacaacataccaaaacctataggatatagcaacagcagcactaagaggaaagtttatagcaataaatgcctatatccaaaaagtagaaagatttcaaataaacaacctaattatgtaacacaaggaactagaaaagcaggaacaaaccaaaccaaaaattagtagaaggaaagaaataataaagatcagaacagagtatatgaaattgagattaaaaattataaaagatcaatgaaatgaaaagttggttttttttgaaagataaaatcaacaaaacattagctagaataaccaagagaaaaaaagaaaagacccaaataaaatcagaatgaaaaagacgttacaactgataacacggaaatacaaggatcattggagaccattacaaacaactgtactccaacaaattagaaaacttagcagaaatgaataaatttctagacacatacaatctactaagattaagcaaagaagaaatagaaaacccaaacagaccaattatgagtaatgattgaatctgtaataaaaagtcttccattgaagaaaaccccaggacttgattacatcactgtagaattctaccaaacatttaaagaagaacaaataccagttcttctcaaactcttttagaaaattgaagatgaggaaattcttccaaacttattctgtgtgaccaatattaccctggtatcaaccagacaaggacgcaacaacaacaacaaaagaaacctattggcctatgttcttgataaataaagacgtaaaagtcctcaaaaaaatactaacaaaccaaatctcctaaacccagcagcacattgaaaaaaattattcaccatgatcaagtgggattcatccgagggatgcaaggatgaatcaatatacacatattaataaatgtgatacattaataaatgtgatacatcacatcaacaggatggaggacaaaaaccctatgatcatctcaatatatgcagaaaaagcatttgataaaattcaacatctttttgtgacaaaaactctcaccaaataaggtatggaaggaatgtacctcaacacagtaaaggccatacaagacaaacccgcacccaatatcatgctgaatgaggaaaagttgaaagcttttcccctaagatgtgggacaagataatgatgcttacttttgttcaacatagtaatgaaagttctggccaaagcaaacaggcaagagaaagaaataaagggcatccaaattggaaagaaggaagtcaaattgtccctgtttgcagatgacatgatcttatatacagaaaaccctaaaggctctatcaaatactcctagaactgataaatttagtaaagttggatacaaaaccagcatacaaagatcagtggtatttctataccccaagaataaaccatcaaaacaagaaatcaagaaaaacaatcccatttacaatagctacaaaaaataatatgtaggaataaatttagccaaagaggtgaaatatctctacaaggaaaactatacaacactgatgaaaaaaattgaggaggatacaaatagacatctcatgttcatggattggaagacttaatattgtgaaaatgtccatactatccaaagttatctgttcattcaatgcactccctatcaaaataccaataacattcttcacagaaatggaaaaaacaatcctaaaatttgtgcagaaccatggaagaccccaaatagcaaaagcaaatcctgagcaaaaggaataaagctggaggcatcacactaccagacttcaaaatgaaggcaatagtaatcaaaccagaatggttaaaaacataaaaacagatatgtagaccaatgagacagaacagagaaccccaaaataaatctacttatttacagacaactgatatttgacaaaggtgccaagaacattcataggggaatgataatctcttcaataaactgtgccaggagagctagatatcaatacacagaaaaatgaaactggactcctatctctcaccataaaaaaggtcaattcaaaatggactaagaacttaaatgtaagaccccaaactatgaaactaccagaagaaaacacaaaggaaatgcttcaggacattggtctgatgaaagattttatggagaagacctcaaaagcccaggcaactaaagcaaatataggcaaatggaattctatcaaactgaaaatcttttgcacagcaaaggaaccaatcaacagataatcaagagataacctgcagaatgggagaaaacatttgcaaactatctgacaagggattaatatccagaatatataagggaattacctcaatagcaaaaataaacaaacaaaaataacctactttaaaaatgggcaaatgagctgaatagatatctctgaaaaagaagacatacaaatggccaacaggtatatggaacaatgctcaacagcactaatcatcagagatatgcaaattaaaaccacaaggagatatggtctcatatctgttagaatagctattatcaaaaagataaaagataacaagtattggagaggatgtagagaaaagggaatccctgcacacttttggtgggaatgcaaatttgtgcagtcattatggagaataatatggaggttacccagaaaactaaaaacagaactaccatatgatacagcaatcccactactgggtatatatccaaaaggaaggaaatcagtatgtcaaagagatatctgcactctcatggtcattgcagcactattcacaacaaccaagatatggaatcaacctaagtgtccatcaacagatgaaatgataaagaaaatatggtatatatacacaatggaatagtatttaaccataaaaaagaacaaaattctgtcatctgtggcaacattgatgagcttggaggacattatgttaagtgaaataagccagccacaggaagataaatactgcatgttctcattcatatgtagaagcttaaaatgttgatctcatagaagtagagagtatagaatagtggttaatagaagcagagaaggatagaggggtggaaaggatagtcaaaggttgcttaacagatactaattacagctacataggaggaatagggactagtgttccatagaactatagggtgagtataattaacaatttattgtgtattttcaaatagctaggagagcagattttgaatgtaccaaacacaaagaaatgataactgtttgaggtgatgctaattacctcaatttgatcattatacattgtatacatgtatcaaaatatcacactgtaccccatatgtacaattattacatcaactaaaaata

SEQ ID NO: 4070 - DNA, 928 bp, Homo sapiens
  source 1..928: mol_type = other DNA
agatccagctctaaaacagcaccctgagaagcttctcacccactccccagtggtgggcagggaggggaacctggtagaaatattttttagaaaaacccatttaaagttttaaaaaccattaggaaaattgtcctaaggacatacatcaaataaagacatatttattcagaaaatttactaaattcctgtaagaaaagtgagggtctctggtacttagccatggcccactccttcccttcccccatgttcagcagaagggaaactccactgtgggaggatatggccaagaacactgggatcacagtcactccagctcccagtcaagggctatggtatctcccctaggaggagaaggctgccagcgtttctcatctccctaccgctgtgaagcagaaacaacatttgaggctaatgaggccaagaggtcagggactcccttcctccactcaaccataaggcaaaggttcagtgggctgggaatactggattcctggtcaccttttctccagctacttcatagtgtggagtttccatgccaggagagtcaagctgaagttgaaaagaccagaggctactacgccactcaggaccatgctcaaaaagtagatgggtcactctagaagatgcaagccactgtcaccaaccccaggtccagagcagtggctcagatatgttgcccagaggagaggcatgccttaagaacagagagctctgaagctgtcctcaagtaaactgacttgtttggaacagagtgtggggaagttcaaggttaagagtactgccaaaaacaatggagattttgacagtaagcaattaagaggaaatgagtagcttgataaaagcaacaagctcaaccataggccagctaggttgccagagaaccagtgaaagagacagtaagaaataaccctcttggagtaaaaacaaa

SEQ ID NO: 4071 - DNA, 340 bp, Homo sapiens
  source 1..340: mol_type = other DNA
ccttggttccctgaccaggaagcgaggtgactgacaagccctgtggagcgtccctgcagaggactccggccagcctgactgacgcaatccaaagagcgctcccgggtaggaaatggccccggtggaatgccttgccagagcagcgcatagcaggctcccgagaaggattaacactggctgaacaccgggaaggaactggcacttgaagtccagacatctgaagcttgtcaagactagtttttggaacttgccccactccatgtgagtggaagcatggcctgatcacccacggtgtgcctgtattgacatctttgttctggttttgacttggcttgacttg

SEQ ID NO: 4072 - DNA, 388 bp, Homo sapiens
  source 1..388: mol_type = other DNA
cagcatgccctccaataacatcatttcattcagtattgttttgttacaatgttgatgagaaaaaaatcgattcccagttggggccactgcctctgtggactttgcctgttctccccatgtctgcgtggatttcctctgggcactctggtttcctcccacatcccaaagctgtgcacgttaagtgaattgacatgtccaaattgtcccattgtgagtgagtgtgagtgtttatgtgtgtgaggggaccctgccaaggttggttcctgccttgccctctgatttgctaggatgagctctggccacctgcaaccctgaaccccagtaagtaggttggaagatgaatgcatgaataaatacaaattattgtaaaatgtaaatttgtaaagtg

SEQ ID NO: 4073 - DNA, 105 bp, Homo sapiens
  source 1..105: mol_type = other DNA
tctgggtattaagatcatatgcaatgtttattttattctgtatgctttcataaatttttcacatttccttcaataaaaacatatagttttatattcagaagacaa

SEQ ID NO: 4074 - DNA, 217 bp, Homo sapiens
  source 1..217: mol_type = other DNA
aattatacttttaggacttcatcttatagctataccctgaatcgatatgcttaataacattaggattgaagttatcactgtaatagcaaaagaacaacctaagcattcaccagtagcagattaaatcaattatgttatatctattcaaaaaaattttaggcagccaaaaaaagaatgaggttccttgctacttacatgctggtatagaatgatctcc

SEQ ID NO: 4075 - DNA, 289 bp, Homo sapiens
  source 1..289: mol_type = other DNA
gctgggcgcagtggctcacgcctgtaatcccaacactttgggaggctgaagtgggcagatcacttgaggccaggaatttgagaccagctttgccaacatggtgaaacctcgtcgttactaaaaatacaaaaattagccaggtgtggtggtgatgccagctacttgagaagctgcagcacgagaatcacttggaccgggaggcaggagttgcagtgagccaagactgtgccactgcactccagcctgggcagcagagtgagactctgtctcaaaaaaaaaaaaaaaaaaa

SEQ ID NO: 4076 - DNA, 137 bp, Homo sapiens
  source 1..137: mol_type = other DNA
ttattctttcagaaactcttgcattatctgtagacgtggacgtaaatatccacctcatagggttttcataaaaaataattgagataatgtatgtaatgtttcacagtgctttgcagactatctaataaatagtagct

SEQ ID NO: 4077 - DNA, 1208 bp, Homo sapiens
  source 1..1208: mol_type = other DNA
catcatcatggacccttgcttgagttggggcttataggaacaagtaaaaactggtgccctggataaagtctgggtcacagattgcatctgcagacccacccagaggtcattttctgagtcccacagtagagagttaaaatggatatccttagcagttggagtaatccctacattgaattcttgggctcaagtaaacactatcataggaaacctctgaaattgccctccaaccaccatcaatacagctgatcaaaaccagagttatattctcaaagagaatcataaagagtattgccaccattgtaatcctgaaggacgtggtggtggttcctgcctctctttattttgacagtctgccccactccctgctgcaaaataaaaggactttgaacaatttttgtagaagactgcaagaagtccaaattgaagctgcagtgccatacctagggtcattgtagagcagatgaatgaggccacatgtacactgcaggcagccattgatttgacaaaagtgttctttttgattccaattaggaaacaaattagaaagagtttagttttgtggaacacatactattcatttatagttttgccgcaggactatataaattctcccattctgtgtcatagtctgaaggagatttggactccctggacatcccatagaatatcaagccaatcttttatatcagtaatattgaggaaactaggcaggatgaacaggaggtggctagcatgtgggaaacctgctaagacacttatattccagaaagttggagatataccctatgaaaattcaaggaactgcaatttcagtgaagtttttaaagatcgaatagtaaggggtctgccaggatatccatcattctaaagcgaaacaaattatttcatcttgcatctgctgtcacaaaaaaaaaaaaaaaaaaaaaaagagagaaagacatggtaggcctcttgggttatggaaaatatgcatattccacctagcagttactgctcaggtccatatatctaagccctatttattagaaaagggcttagtaacaggtccagggtgtaagcacatggccctgaagcttgggcattataatcttgcggatgctatggcagtgcaaatgtatgtgtagagtgagaaaagatgcagtaagcacctgtggaaaactctaaggaaagaattacaagacaggcccttgagattctgaagcaag

SEQ ID NO: 4078 - DNA, 2888 bp, Homo sapiens
  source 1..2888: mol_type = other DNA
acattcattttacaagaagatcataaaagttaaaaacttaaaacaaactttggcaattaagatagcataccaagatgcaaatgcctggttggaatggatcaaatattccatctgcacgttaaacaaaagcaattgttatgcttgtgcacatggcaggccagaggccctgattgtctcccttccactaagatggtcctccagtcggccaggcgtgggctgcatggtagctgttttccaggattctacagcctggattaataagtcatgccaggctctctctgctatatcccaaagtctggtaccctgcgggtcagcccctgagggccatccagcctccgtctcccaacactaagttcacttcgttgtctctcacgacagggaggaaacttagcattccttggagacctgaagggatgcgatgagcttaagaattttcaagagcttatcaatcagtcagccattgttcatccgcaagcagatgtgtggtggtattgtggtggacctttactgggcactctgccgaataactggagtggcacttatactttagtccaattggctatccctttcaccctggcatttcatcaaccagaaggaaaaaaaataagacattgtaaagtgagagaagccccttataggtctttcgactctcctgtccatttagacgcagttggagtcccacgaggaatacagatcaatttaaagcttgaaatcaaatagctacaggatttaattcaatattttagtaggtgacagttaataaaaatataaattagataaactacatctattacaaccaacagcagcaagcttttcatgagttaaaagaaaaactcaggtcggccccagccctggggccacctgacctgacaaaactttttacactctatgtgtcaaaaaaaaaaaaaaaaaaatggcagttggagttttaacccagactgtaaggtcctggccaaggccagtggcctatctctcaaaacactagaaggggtttccaaaggctggcccccatgtctaaggtccctggcagcaatgaccctgttagcacaagaagcagataagctaactcttaggcaaaacctaaagtccccccatgctgtggtaactttaataaataccaaaggacatcattagctaatgaatgctagactgactagataccaaagcttgctctgtgaaaatccctgcataaccgtcgaagtttgcaacaccctaaacccagccaccttactcctggtatcagagagcccagttgaacataactgtgtagagttattggactcagtttattctagtgggtccaacctccaagaccatccttaaacatcagtagactgggagctgtacgtggatgggagcagcttcgccaacccctgcaaagtgattctgaagaagacgacaagcgctgctccagtcacacccggaagctgactggtccactcatggccgaagcatgaggaaactcatcgcgggactcattttccttaaaatttggacttgcacagtaaggacttcaactgaccttcctcagactgaggactgttcccagtatatacatcaagtcactgaggtaggataaaagattgctacagtcctattactttatggttattataagtgtaccgggactctaaaagaaacttgtttgcataatgctattctatccaaggtatgtagcgcagtctctaaatgttatgtttgtggaggaactgtaacaggagatcaatggccataagaagcctgagaattagagcctacagacccagttcctgatgaattcccagccctaaagaatcaccctgatcatttctaggttctaaaagtttcaaatattggacaatattgcaaagctagaaaaaggaaagaattcactcattctgtaggatgacttagttgcttaggacaaaaactgtgtaatagtaccacaaaaacagttacgtggtggagttcaaaacacacagataaaaatccattcagtagatttccaaagttgcagaccatttaagcccacccagaatcccaccgggactggacggcccccactaggctatactgggtatgtggacatagaacctacgctaagctgcctgaccagtggtcaggtagttgtattattggcactattaaaccatctttcttcctactacccataaaaagaggcaaactcctgggcttccctgtctatgcttcctgcaaaaagaaaagcatagctataaaaaaattcaaaaataatgaatagccccctaagcaaatcatacaatattataggcctggtacttaggcacaagacagctcatggggataccagacccccatttacatgctcaactgaatcatatggttgcaggctgttctagaaatcatcactaataaaacctgtcaagccttgactattctggcccggcaagaaactcagataagaaatgctatctatcaaaatagattggctctcgactacttgctagcagctgaaagagaggtctataagaaatttaaccttactagttactgtctacacatagataatcaaaggcaagtagttaaagacatagttaaaaatatgacaaaactggcacatgtgcctgtacaagtgtaacatggattcgaccctgaagccatgtttagaaggtggttcccagcactaagaaaatttaaaactcttataataagagttataatagtaataggaacctgcttactgctcccttgtttgctacctgtacttcttcaaatgataaaaagcttcatcactaccttgattcaccaaaatgcttcagcacaagtgtactatatgaatcactatcaatctattgcacaagaagatgtaagtagcaaaaataagagtgagaactccaactaataaaaagtgagagtctcgaaggggggaa

SEQ ID NO: 4079 - DNA, 1085 bp, Homo sapiens
  source 1..1085: mol_type = other DNA
cttgacaggattgatcttgggaacttgcctactccattcaagtggaagcatggcctgatcacccatggtatgcctgtatcggcactttgttttttgtttttgacttgacttagattgcttgatactttggttttggttttgacctggcttggatttcctgatactccgattttggttttgattctggtttggtgtaaactgtaaaagtgtgtgtgtgccctttttacccgttctttgttttgtagtgtgcgtgtggtgtgagcgtggtgttttgtctcgaggagacacgggtcaggtacaaactaagcccaccccactaggaactatgttgaaaaatttcaagaaagaatttaagggagattacggtgttactatgataccaggaaaacttagaactttgtgtgaaatagactggccagcatttgaggtgggttggccatcagaaggaagcctagacaggtcccttgtttcagaggtatggcacaaggtaacctgtaagccaaggcacgcagaccagtttccgtacatagacagttacagctggttttagacccccttccccccaacagtagttaagagaacagcagcataagcggctggcagaggcaaggaaagaccagcagagagaaagagaggaaagagagaaaaagaggcaaagagagaggaaaagacacagaggaagagacagagagacaaagaaggagtcaagaaaagagagagagacagagaaagatagaggcagaaagagaggaagagacaaaggcaaaaggaaagtcagagagagagacagaaagtcaaagagagaaagaacaagagagagaaatatacaagtagttaagaaaaatacaatatacctgattcctttaaaagccaaggcatatttaaaacctataattgataattaaaggtattctcagtaaccctgtaacactgtaataccactttgttgtcagtgtaaacaagggcgtatccggaaagcactgaggccttcctatcagaaacccttaacccagtaacctgcggatggcccagatgtgttcaatctgtagcggcagctgctttgctaacaggaaaaaaaaaaaaaa

SEQ ID NO: 4080 - DNA, 278 bp, Homo sapiens
  source 1..278: mol_type = other DNA
aagattttaataccatagttttactgcaccttttctatgtttaggtattttagatacccaaatgccattgtgttacaattgcctgcagtattcagtacagtaacatgctgtacaggtttgtagcctaggagctacaggctataccgtatagcctaggtgtgtagtaggtgattccacctaggtttgtgttaagtacactctatgatgttcacacaatgaagaaatcacctaacgacatgtttcttaaaacacatccctttcattaaatgacatatgac

SEQ ID NO: 4081 - DNA, 188 bp, Homo sapiens
  source 1..188: mol_type = other DNA
agccaggcgtggtggctcacgcccataatcccagcactttgggagacgagatgggtgatcacttgagctcaggagttgagagaccagcctgagcaacatggcggaggttgcagtgggctgagatggcgccactgcactccagtatgggcaacacagtgagatgctgtctccaaaaaaaaaaaaaaaaa

SEQ ID NO: 4082 - DNA, 670 bp, Homo sapiens
  source 1..670: mol_type = other DNA
cattcccccttacccaaattgatatctagattcaatgtaattccaatcaaaaccatgacagacttttgtgtagaaactgaaaagctgattctaaaatgtaaagaaatgcaaatgacttcaaagaatcataagaattttgaaaaagaacaaactgtcaaatttcaaaatttgctgagaagagtactgtaatcaaaaaacattatgtattagctgaatggacaaatcaataaagaacagaccacacacagatggctgatttttgtataaaaatgccaaaataatataatgaaaaagtactgtctttaataaatggtgttttaacatacagtttttaaaaaaatgaacctcaacctcacacaaaaaataactcacaaaatggattacaggtttatattttaaagctaaaactataaaaatgctgggttaaaaagtggagaaaatcttagtaaacttggggtaggcaaaaaattgttagataggacacaaaagtcattaaccataaaataaattgataaaccagacttaatcaaaatttaaacctttagctcttcaaaagacaccaagaaaatgagcatgcaagccagagtcaatacctgcaatacatgtatctgacaaaggacctagatatagaatatatataaagaactttacgtttcaataaaaaggcaaa

SEQ ID NO: 4083 - DNA, 313 bp, Homo sapiens
  source 1..313: mol_type = other DNA
ggctgggtgcagtggctcacgcctgtcaatatcagcactttgggaggccgaggcgggcagatcaccaggtcaagagatcgagaccatcctggccaacatggtgaaaccccgtctctactaaaaaatacaaaaatcagctgggcgtagtggcgcatgcctatagtcccagctactcaggaggctgaggcaggagaatcacttgaacctgggaggcggaggttgcagtgagcagagatcacattactgcactccagcctggtaacagagcaagactcatctcaaaaaaacaaaacaaaacaaaacaaaacaaaac

SEQ ID NO: 4084 - DNA, 708 bp, Homo sapiens
  source 1..708: mol_type = other DNA
accaagtgaggtatatctcaagaatgcaagattgatttaacatctaaaaatcaacgtaattcatacattaacaaaaaaaggagacaaattgcatgaccatttcaatagacacaggaaaagtacatggcaaaattcatcacccattcataataaaaattctcagcatattaaaaatagaagggaacttcttcattttgataatgggcatctatagaaaacagctaacatattaatggtgaaaaattgagtgttttcctcctaagatgaggaataaggtaaggaaatcctttctcatttaatactgaaattcaacttctagtcaatattgtattggagtccttgctggtgcaataagaagacataaattattaagaatagaaagcaagaagtaaagctatctccctgtagactacatagaaaatcctaaggagtccttgaaacaaaaaaaaaagatacttaataatcgaatttagcaagataatgggatgaaaccaataatcgtatttcaatatactaccaacagtttgaaatgaaaattttaaaaatatcatatacgatatcatttaacattataaaatgtttaatatttatactatgtaaacaaaaattgtacaagaatgctacaatgaaaaccacaagacagtgccgagaatttaagagataacacatattcacagattggaagaaccaatattgttaagaacatta

SEQ ID NO: 4085 - DNA, 296 bp, Homo sapiens
  source 1..296: mol_type = other DNA
gaacaaagagaaaacaaataaaaagatgtcagtcttaaaccttgccataccaacaattacataaaatataaatggattaaacaaaagcaaaaattaaaagctgggataaaaaagtaagacaactatacgctatctacgagatactttaaaaagctagaagtaaaagcatgggaaaaatataccattcaaacacatagattaaaaaaacaatggcattaatatcaggcaaagtagaccataacatagcattataggaagcaaagaacatttcaccttaaaaaagggcaggcaattca

SEQ ID NO: 4086 - DNA, 5104 bp, Homo sapiens
  source 1..5104: mol_type = other DNA
agaaaagctgaaaattctaaaaaccagagcgcctcttctccaaaagatcgcagctcctcgccagcaacggaacaaagctggacggagaataactttgatgagttgacagaagtaggcatcagaaggttggtaataacaaacttttccgagctaaaggaggatgttcaaacccatcacaaggaagctaaaaaccttgaaaaaagattagacgaatggctaacgagcataaacagtgtagagaagaccttaaatgacctatggagctgaaaaccatggcatgagaactaggtgatgcatgcacaagcttcagtagccaacacgatcaagtggaagaaagggtatcagtgattgaagatcaaatgaatgaaatgaagcgagaagagaagtttagagaaaaaagagtaaaaagaaatgaacaaagcctccaaggaataagggactttgtgaaaagaccaaatctacgtctgatcggtatacctgaaagtgatggggagaatggaaccaagctggaaaacactcttcgggatattatccaggagaacttctccaacctagcaaggcaggccaacgttcaaattcaggaaatacagagaacaccacaaagatactcctcgagaagagcaactccaagacacataattgtcagattcaccaaagttgaaatgaaggaaaaaacgttaagcgcggccagaaagaaaggtcaggttacctacccacaaagggaagcccatcagactaacagtggatctctcggcagaaactctacaagccaagagagtgagggccaatattcaacactcttaaagaaaagaattttcaacccagaatttcacatccagtcaaaccaagcttgataagtgaaggagaaataaaatcctttatagacaagaaaatgctgagagatttttgtcaccaccaggcctgccttacaagagctcctaaaggaagcactaaacatggaaaggaacaactgagaccagccactgcaaaaacatgccaaattgtaaagaccatcgatgctaggaagaaactgcatcaactaacgggcaaaataaccggctaacatcataatgacaggatcaaattcacacataacaatattaaccttaaatgtaaatgggctaaatgccccaattaaaagacaaagactggcaaattggatcgagagtcaagacccatcagtgtgctatattcgggagacccatctcacgtgcacagacacacataggctcaaaataaagggatggaggaagatctaccaagcaaatggaaagcaaaaatagcagaggttgcaatcctagtctctgataaaacagactttaaaccaacaaagatcaaaggagacaaagaaggccaatacataatggcaaagggatcaattcaacaagaaaagctaactaacctgaatatatatgcacccaatacaggagcacccagattcatacagcaagtccttagagacctacaaagagacttagactcccacacaataataatgggagactttaacaccccactgtcaacattagacaaatcaatgagacagaagtttaacaaggatatccaagacttgaactcagctttgcaccaagcagacctaagagacatctacagaactctccaccccaaatcaacagaatatacattcttctcagcaccacactgcagttattccaaaactgaccacatagttggaagtaaagcactcctcagtaaatgtaaaagaacagaaatcacaacaaactgtctcacagaccactgtgcaatcaaattagaactcaggactaagaaactcacttaaaaccgcacaactacatgaaaactgaacaacctgctcctaaatgattactgggtacataacaaaatgaaggcagaaataaagatgttctttgaaaccaatgagaacaaagacacaacgtaccagaatctctgggacacatttaaagcagtgtgaggagggaaatttatagcactaaatgcccacaagagaaagcaggaaagatctaaaactgacaccctaacattacaattaaaggaactagagatgcaagagcaaacaaattcaaaagctagcagaaggcaagaaataactaagatcagagcagaactgaaggagatagagacacaaaaaaccccttcaaaaaattcatgaattcaggagctgttttttttttgaaaagatcaacaaaatagatagaacactaccaagactaataaagaagaaaaaagagaagaatcaaatagatgcaataaaaaatgacaaaggggatatcaccaccgatcccacagaaatacaaactaccatcagagaatactattaacacctctacagaaataagctagaaaatctagaagaaatggataaattcctggacacatacacactcccaagactaaaccaggaagaagttgaatccctgaatagaccaataacagtctctgaaattgaggcaataattaagagcctaccaacgaaaaaaagtccaggaccagacatattcacagccaattctaccagaggtagaaagaggagctggtaccattccttttgaaactattccaatcaacagaaaaacagggaatcctccctatctcattttatgaggccagcatcataaatctgccaaccctggcagagacacaacaaaaaaagagaattttagaccaatatccctgatgaacatcgatgtgaaaattctcaataaaatactggcaaaccaaatccggcagcatatcaaaaagcttattcaccaagatcaagtgggcttcatccctgggatgcaaggctggctcaacatatgcatattgagaaacgtaatccatcacataaacagaaccaaagacaaaaactacatgattatttcaatagatgcagaaaaggcctttgacaaaattcaacagcccttcatgctaaaaactctcaataaactaggtattggtggaacgtatctcaaaataataagagctatttatgacaaacccacagtcaatatcatactgaatgggcaaaaactgacctttgaaaaattccctttgaaaattggcacaagacagggatgccctctctcaccactcctgttcaacatagtgttggaagttctggccagggcaatcaggcaagagaaagaaataaagggtattcaattagcaaaagaggaagtcaaattgtccctgtttgcagatgacatgattgtatatttagaaaaccccattgtctcagtccaaaatctccttaagctgataagcaacttcagcaaagtctcaggatacaaaatcaaggtgcaaaaatcacaagcattcttatacgccaataacagacaaacagagagccaaatcatgagtgaactcccattcacaattgcttcaaagagaataaaatacctaggaatccaacttacaagggatgtgaaggacctcttcaaggagaactacaaaccactgctcaacaaaataaaagaggacacaaacaaatggaagaacattccaggctcatggataggaagaatcaatattgtgaaattggccatactgcccaaggtagtttatagattcaatgccatccccatcaagttaccaatgactgtcttcacagaactggaaaaaaactactttaaagttcatatggaaccataaaagagcccgcattgccaagacaatcctaagcaaaaagaacaaagctggaggcatcatgctacctgacttcaaagtacactacaaggctacagtaaccaaaacagcatggtactgggaccaaaacagagatacagaccagtaggacagaatacaggcctcagaaataacatcagacatctataaccatctgatcttcgacaaacctgacaaaaacaagaaatggggaaaggattccctatttaataaatggttttgggaacactggctagccatatgtagaaagctgaaaccggatcccttccttacaccttatacaaaaattaattcaagatggattaaagacttaaatgttagacctaaaaccataaaaaccctagaagaaaacctaggcaataccattcaggacataggcatgggcaaggacttcatgactaaaacaccaaaagcaatggcaacaaaagccaaaatagacaaatgggatctaattaaactaaagaacttctgcacagcaaaagaaactgccattagagtgaacaggcaacctacagaatgggaaaaaatttttgcaatttacctatctgacaaagggctaatatccagaatctacaaagaatgtaaatttacaagaaaaaaatcaaacaaccccatcaaaaagtgggcaaagaatatgaacagacacttttcaaaagaaaacatgtatgcagccaacggacacatgaaaaatgctcatcatcactggtcatcagagaaatacaaatcaaaaccacaatgagataccatctcacaccagttagaatggcgatcattaaaaagtcaggaaacaacaggtgctggagaggatgtggagaaataggaacacttttacactgttggtgggagtgtaaactggtttaaccattgtggaagacagtgtggcgattcctcaaggatctagaactagaaataccatttgacccagtgatcccattactgggtatatacccaaaggattataaatcatgctactataaagacatgcacatgtatgtttattgtggcactactgacaacaggagagacttggaaccaacccaaatgtccatcagtgatagactggattaagaaaatgtggcgcatatacaccatggaatactatgcagccataaaaaaggatgagttcatgtcctttgtagggacatggatgaagctggaaaccatcattctgagcaaacagaaaaccaaatgctgcatgttctcactcataggtgggaactgaacaatgagaacacttggacacagggcagagaacatcacacaccagggactgtcatggggtgaggggatgggggaggcacagcattaagagaaatacctaatgtaaatgatgagttaatgggtgcagcaaaccaacatggcacatgcatatatatgtaacaaacctgcacattgtgcacatgtaccctagaacttaaagtataattaaaaaaaaaaa

SEQ ID NO: 4087 - DNA, 545 bp, Homo sapiens
  source 1..545: mol_type = other DNA
ctcccgataatggcagactagataatttggatcaacagtgagaatgactagaaaacctgcacaaaatacagaaattgtctatatgaaatgctagagcaaatagtaaagcattattggacaggattgggttggagttggggctaagaatggtgggggcctttttctccccttgaggtatttgcccagagattgaggagtaattttgataggctcacagggctgagaaatcacagcttagagtgcaaggatcatgcatggtgaatgtgtctccttgtcttgagttgggaccctgaaagtctgcactattatagtaaagataaattagctagtaagttgttcctcacagggactaaagctcagcaactaaaattggattaaagtgaaatcatatcgctggctcctcaagtttccttgtagaatcaaatgtaaatccttgctagaaagaaaaagaaaacatctaggcctccaacttattcaataatgaattttgcaaaaacagtattcacagaattagaaataaccaggtttgttaggagattagacaa

SEQ ID NO: 4088 - DNA, 289 bp, Homo sapiens
  source 1..289: mol_type = other DNA
gttaggcatagtggctcatgcctgtaatcccagcacattcagaggccaaggcgggaggactgcttgagcttaggagttcaagaccagcctgggcaacatagtgagaccttgtctctactaaaaacctaaaaagattagctgagtatggtggcatgcacctatagtcccggctactagggaagctgaggcaagaggatggcttgagcctgagaaatcaaggctgcagggagctgtaattgtgccctgcactccagcctgggcaacagagtgagaccctgtctcaaaaaaa

SEQ ID NO: 4089 - DNA, 42 bp, Homo sapiens
  source 1..42: mol_type = other DNA
tggcagttgtattttttaaagcccttctgatgattccaatgt

SEQ ID NO: 4090 - DNA, 305 bp, Homo sapiens
  source 1..305: mol_type = other DNA
ccgggcatggtggctcatacctgtaatcctagcactttgggaggccaaggcgggcagattgcctgagctcaggagtttgagaccagcctgggcaacacagtgaaaccctgtctctactaaaaaatacaaaaaattagctgggcgcggcagtgtgtgcctgtagttccagctactcgggaggctgaggcaggagaattgcttgaacccgggaggcagaggttgcagtgagccgagatcgcgccactgcactccagcctggacgatggagtgagattcagtctcaaaaaaaaaaaaaaaaaaaaaaa

SEQ ID NO: 4091 - DNA, 121 bp, Homo sapiens
  source 1..121: mol_type = other DNA
cagtggtccccaaattttgctacatattagaatcatctgggaggttttaaacaaattctgatgcccaggttgcaccccatgccaatgaaatcatttctgggcgtcagcgccaggcagttgt

SEQ ID NO: 4092 - DNA, 311 bp, Homo sapiens
  source 1..311: mol_type = other DNA
ggttgggcatggtgccaaattcctgtaatcccagcactttgagaggcctaggctggtggatccctagagcccaggagtgtgagaccagccagccaggacaacatggtggaagtgaaacttcgtctctacaaaaaaaacacaaaaataagccggctgtggctgcgcgtggctgttgttctagctacttgggagactagcaggaaaatcactcgaactcaggagggagaggttgcagtgagctaagatagcaccactgcactccagcctgggtgacagggagagactgtctcaaaaaataaataaataaataa

SEQ ID NO: 4093 - DNA, 96 bp, Homo sapiens
  source 1..96: mol_type = other DNA
aaaaagcatcccagctcaaataagtttagaaaacaataaatcaaagctaaacaactcttgtaatgaaaggacttctcagagcccctaatttgctga

SEQ ID NO: 4094 - DNA, 305 bp, Homo sapiens
  source 1..305: mol_type = other DNA
gctgggtgccatggctcacgcttataatcccagcactttgggagaccgagatgggcgtatcacttgagatcaggagttcaagaccagcctggccaaccaaccccatctctactaaaatacaaacattagccgggcatggtggcacatgcctgtaatcccagctactcaggaggctgaggaaggagaattgcttgaacacaaaggtggaggttgcagtgagccaagatcgcaccactgcactccagcctgggtgacagagcgagactccagctctcaaaacaaaaaaaaacaaacaaaaaaaaaaa

SEQ ID NO: 4095 - DNA, 597 bp, Homo sapiens
  source 1..597: mol_type = other DNA
gggggggtcagccccccgcccggccagccgccctgtctgggaggtgaggggcgcctctgcccggccgccaccccgtctgggaggtgtactcaacagctcattgagaacgggccatgatgacaatggcagttttgtggaatagaaaggggggggaaggtggggaaaagattgagaaatcgaatggttgccgtgtctgtgtagaaagaggacatgggagacttttcattttgttctgtactaagaacaattcttctgccttgggatcctgttgatctgtgaccttacccccaaccctgtgctctctgaaacatgtgctgtgtccactcagggttgaatggattaagggtggtgcaagatgtgctttgttaaacagatgcttgaaggcagcatgctcgttaagagtcatcaccactccctaatctcaagtacccagggacacaaacactgcggaaggccgcagggtcctctgcctaggaaaaccagagacctttgttcacttatctgctgaccttccctccactattgtcctgtgactctgccaaatccccctctgcgagaaacacccaagaatgatcaataaaaaaaaaagaaaaagaa

SEQ ID NO: 4096 - DNA, 224 bp, Homo sapiens
  source 1..224: mol_type = other DNA
cagctgtggctaatggctgcaagctcagttctggagctgggcagactcaggttcaagccctcctcgcccctcaagagttgtgtggctctgggcagtttccttggctgtagggggactaatattgccgatctcacagggctacggagaagatgaaacaggacaacccatgagcaattcccagcacagtgtgtggcatgcaggaagcgggagtatcactaaatggt

SEQ ID NO: 4097 - DNA, 151 bp, Homo sapiens
  source 1..151: mol_type = other DNA
cttctcagagcatccggtcagctcccttatctataaatgggggctgttatccccctccctgtgggatggctgttggggccccttgagacaacgctcataaaggccttagcccgggagtcatgaaagcattcaacaaatgttggctattatt

SEQ ID NO: 4098 - DNA, 216 bp, Homo sapiens
  source 1..216: mol_type = other DNA
tacaatattcaataaattacatgatatattcaacactcgattataaaatagagtttgtgttagatgattctgcccaactgtgggcaattctaagtgttctgagtacatttagggtggacgaggctaagctgtggtgtccagtcaggggtattaaatgcatttgacttccaatgggtttactgggacataaccccatcataagtcaaagagcatctg

SEQ ID NO: 4099 - DNA, 698 bp, Homo sapiens
  source 1..698: mol_type = other DNA
agccatcatgaaaatacaaatcaaaagcaccatgagataccacttcacacccgttaggatgactctaataaaaagatggataagaacaagtgttgacaaggacatggagaaattagaaatctcatacactgctggtaggaatgtaaaatagtgaagctactctggagaacagtctggtagttcctcaaaaggttaaacatagagttaccatatgacccagcacatagcactcctaggtacctacccaaaagaagtgaaaacatatatgttcacataaaaatttgtacatgattgtctgtagcggcattattcataatagccacaacacagaagaaacttaaatgtccattaactgatgaagtgataaacaaaatgcactatatccatataatggaatattatttggccatcaaagtgctgatacatgctataacttggatgactcttgaaaacattatgctaaatgaaagaagctagtcataaaaggccatctaatgtatgattccacttagatgaaatgtccagaatagaaaaatccagagagacagaaagtggattggaggttgcttagagttagggagtggcggctaataggtatagggtgttttgttggggtgatgaaaatgctctaaaattgtggtgatggttgtataactctgtgaatatgctgaaagccactgaactgtatatatttttta

SEQ ID NO: 4100 - DNA, 171 bp, Homo sapiens
  source 1..171: mol_type = other DNA
cactgtccctcacccctacattcaaacacaaagtcccgtggattttgcttttaaatgcctccttggatgcatcccttccaccaccaccttggttcagtcctcttcatctgttgccatgactacagcacacccttcttgctggtctcctcacatcaatctctccttctctgc

SEQ ID NO: 4101 - DNA, 166 bp, Homo sapiens
  source 1..166: mol_type = other DNA
gcttgggagtggaatctgggtttgaagcccagctctgccagtcactggcaatgtggccttggatcagttatctacaggtttttgaacctcagtttcctgatctataggattggggcaataatatctaacttattttggggatagtaagttacattataaaatgcct

SEQ ID NO: 4102 - DNA, 150 bp, Homo sapiens
  source 1..150: mol_type = other DNA
cagaatcacctgggaagggcagatgactttttaaaaatgcatattcctgggccccatccccaaatttgggttattaggtttggggtagaccccaaataagttttcaacatgtaccccaggtggctctcatgcaaaccatttaggaagcac

SEQ ID NO: 4103 - DNA, 907 bp, Homo sapiens
  source 1..907: mol_type = other DNA
aaagtaaatggtgctaatgactggctggcaaagccatggtaaatcaggtggatttcagttctctgctttcaacagactaaaggagaatctaatcaagttgtttgttagttgatagatcatcattaataattcttgatgatagagcactgtgatctttgtcaaaatgccaaaggaatccaaagaactgtaaaaacattgttaacgtaattctattccatcgaatttatgtgcttacatctatacagaaacaaggaatacagctgaggttgaaccccatctcagctgtaaatcacattcatgtattcttggataaatgaactaattaggataaagaacattctaataaaaaaacttttaatcatccaagaattaataccgttttcattatataccaataattaattacgataatattggttctggactgagataacaaacaaacacttaaagcaagagctaaaaaaaaaatttccatttatattttttgttgacaagaagtaatggggtgaatgattaaaagatgtcgggcataatagattacattatgataggattcttggctgaaaagtggtatggaaatacagaaggagaaaagccaatttgaaatgtttaactactaaagaactagctcatttatttttataaatgaatgaagggtgtcaaattgttgtgatatttaaattgtactggatatgtttaaaatagtgatgtaacagtttttattttaaaataccaatatttacacgacaccagcaaatacatactttgtcaactatttaacttcccatgaaaaattttagataccaacttagataaaattttagatatcaacttagatgggtgagggtatacatgatttttcaaaatacttttgggggcacatgagcagaatactttgtggactact

SEQ ID NO: 4104 - DNA, 149 bp, Homo sapiens
  source 1..149: mol_type = other DNA
gttttatgaataaagatgcttgtctcagcactatatgtggatatcaaaaattgtgaacaacttgaacacctatcaggaggagaatactttaatcaattatggcacattcaggagataatgttttacagtcatcaaaaattgtatatgag

SEQ ID NO: 4105 - DNA, 291 bp, Homo sapiens
  source 1..291: mol_type = other DNA
gccagcacggtggctcacacctgtaatcccagcactttgggaggccaaggcaggcggatcacctgaggtcaggagttcgagaccagactggctaacatggtaaaaccctgtttctactaaaaatacaaaaaagtaaccgggtgtggtggcacgtgcctgtaatcccagctactcgggaggctgaggcaggagaatcgcttgaacccgggaggcagaggttgtggtgagctgagattgcactattgcactccagcttgggcaacaagagcgaaactctgtctcaaaaaaaaa

SEQ ID NO: 4106 - DNA, 691 bp, Homo sapiens
  source 1..691: mol_type = other DNA
ttgacagtttcttctaaaactaagcatggacttaccatgggacccagtggttgtgttcctaagcatttacccagagaaatgaaaataaaaacctgtacatgaacacacagagtagctttatttgtaagaacctgaaactggaaacaacccaagtgtccttcaacaggcgaatgtttaaacacactatgttacatccatactatagaatattaatactattcagcaataaaaaggaataaactctcgatacatgtcaaaaccttggatagatctcaaagggattgtgctgaatgaaaacaatcaaatctgattccatttatgtagcatttttgaaatgacaagacataaagatcagattagtgactgccaagggttagggaagtacagggagggagggaggtagctgtggctataaaagggtagcatgagaaatctttacactgaaaatgttttgtatcttggctgtggtggtggtcatcagcatacatgtgataaaattatatagaactaaatacagacacacaataagcatgtgttaaactggtgaactctgaataaggttgatggattgtatcaatgtcaatttcttgatttttgtcctatagtgtgttattgtcctatagttatgcaagaggttaccactggggaaagtatgtgaagagtatatggaatctctgtattatagcttaca

SEQ ID NO: 4107 - DNA, 304 bp, Homo sapiens
  source 1..304: mol_type = other DNA
ccgggcgcagtggctcacgcctgtaatcccaacactttgggaggctgaggtgggtggatcatgaggtcaggagatcaagaccatcccggctaacatggtgaaaccctgtctctactaaaaatacaaaaaaattagccgggcacggtggcgggcacctgtagtcccagctacttggaaggctgaggcaggagaatggcgtgaacccgggagttggagcttgcagtgagctgagatcgtgccactgccctccagcctgggcgacagagcgagactctgtctcaaaaaaaaaaaaaaaaaaaaaaaa

SEQ ID NO: 4108 - DNA, 128 bp, Homo sapiens
  source 1..128: mol_type = other DNA
ggccaggtgtggtggctcatgcctgtaagcccagctatttgagaggctgaggcgggaagatggcttgaggccaggagttcgagaccagtctgagaaacatagtgagaactcaccttaaaaaacaaaaa

SEQ ID NO: 4109 - DNA, 508 bp, Homo sapiens
  source 1..508: mol_type = other DNA
ttaaatataaatctgatcacccccctgcttagaacccttctgctttctattacccctcatttaaaatgtaaactcttcaccttggtttatgagaactggttcttgccttccccttgaacctcattaaatggtgatttcttgctaagctccagcccgagtggtctcctctcagcttctaattttgtgctctttcctgcccttttcctgggccttctcagctctccacccccaccactcttgactcaggtggtgtccttcttcctcaagtcttgacaattcccgggcccttcagtccctgagcagtctacttctgtgtctgtcaccacatcttgtcttttcccctcattgcatttattgcagtttatatatatgctacttttacttgttcatttctgtctcccctaccaggctgtaaatgagggcagaaaccttgtttgttttattcaccatcatgtaccaagtgcttggcacatagtgggccttcattaaatgtttgttgaataaaaga

SEQ ID NO: 4110 - DNA, 174 bp, Homo sapiens
  source 1..174: mol_type = other DNA
aatatacacggattattatttgtactttgtttttccatgtgttttgcttttatccactggcatttttagctccttgaagacatatcatgtgtgagataacttccttcacatctcccatggtccctagcaaaatgctaggcctgtagtagtcaaggtgctcaataaatatttgtt

SEQ ID NO: 4111 - DNA, 110 bp, Homo sapiens
  source 1..110: mol_type = other DNA
tttcagtttagatcctgcctttacctgggtgtgacccgggtccatctcttcagctcggcctctgctttctcttcataaacttttggggttagtcctcggatgatctctaa

SEQ ID NO: 4112 - DNA, 181 bp, Homo sapiens
  source 1..181: mol_type = other DNA
tttctaatttgagataatggagtaaacataagtttaccttccctccctccccaggccccactgaaattgaagtcaagaaatgcaaaaaggaactgacacatctcagcaaagaaaactgaagggatttggttataagtggagaggatctcagcatatttctggaagatagaaagtggatgaa

SEQ ID NO: 4113 - DNA, 238 bp, Homo sapiens
  source 1..238: mol_type = other DNA
aggagttcgagaccagcctaggcaagatggcaacatcccgtctctacaaaataatttttaaaaattagccaagcatggtggcatgtgcctgtggtcctagctacttgggaggctgaagtgggaagatcacttgagcccaggagttcaaggcttcagtgggccatgatggtgccactgcactccagcctgggggacagagtgagaccctgtctcttaaaaagcaagaaaagaaagagaa

SEQ ID NO: 4114 - DNA, 681 bp, Homo sapiens
  source 1..681: mol_type = other DNA
agaataagaagatctctttgaaaataaaataagactgctaaaagtatttggtatacagtctggaaaataaagttgagggaatctctccagataaagagcaaaaagaaatagatagaaaaatataaagaaagaaaaaagacatagacaatcaatatgtaatgttaggagttcctggaagagagaacagagacagtgtaggtgaagaaataaaaagaaaaagaattgaagaacagagcaagctaagtctccagattgagagggcccaatacaatctacatctagacacaatattgtaaaattttggaatattaaggatagaaggaagatattaaagtggccagggagaaaacaaatgaggtcatcacgattagctcaacacaaaaatggatgagaaatagactgctaacagatttgtcatcagcaacactgaatgccagaagtcaatggatcaacatcttcagagcttatggaaaatttttgtacctagaatttcatagtaaggcagactgtcaagaagaacatcaaagtgaagacattttctgtcaggcaaattttcagaaagtctccctcctttgcacccttactgaggaagtatcttgaggaaattctccagcaaaatgaggatgaaaaccaggaaagaagaagaaatgggatccataaaacagtggaccttacttagga

SEQ ID NO: 4115 - DNA, 259 bp, Homo sapiens
  source 1..259: mol_type = other DNA
gttaaatccttatcttttgtaatggggaattattaaagatgttgtaaagtcagtaagtcaagaaattattgctcaaacatattatttaaagttagaaagttagttaccagacgatctaaaataaatattgttaaaagcattacctctagggaatgggatttagatttaaaaagggtgggatgggaaactgtgtttttcattttaagtccttctgtactatttaattttttaccttgtgcatgtattactttgaaaaaat

SEQ ID NO: 4116 - DNA, 385 bp, Homo sapiens
  source 1..385: mol_type = other DNA
accagagtttgtgcagaatgagcttgctgacacacagcctaaatttgtaccgcatgtttcatactaactccctctgagtttgcacatgggacccatgaggaggcatgaagaggtaactgcccatgcccgaggattttccagcccttccttttctttctatcaatcacctactaatcacagaatccactccctacaccttttctactaaaataactctttaaaataagtacaatgggacagatttgagctgggctcctgtctccttgttaatcaaattgcaataaaatgttttcttttgtttttgttttttttttggtgaaaaactcaagtgtcatagttttggcttctagtccattctgcagtgagcttctcttgcttgataaca

SEQ ID NO: 4117 - DNA, 393 bp, Homo sapiens
  source 1..393: mol_type = other DNA
aaccagagtttgtgcagaatgagcttgctgacacacagcctaaatttgtaccgcatgtttcatactaactccctctgagtttgcacatgggacccatgaggaggcatgaagaggtaactgcccatgcccgaggattttccagcccttccttttctttctgtcaatcacctactaatcacagaatccactccctacaccttttctactaaaataactctttaaaataagtacaatgggacagatttgagctgggctcctgtctccttgttaatcaaattgcaataaaatgttttcttttgtttttgtttttgttttttttttttggtgaaaaactcaagtgtcatagttttggcttctagtccattctgcagtgagcttctcttgcttgataac

SEQ ID NO: 4118 - DNA, 391 bp, Homo sapiens
  source 1..391: mol_type = other DNA
aaccagagtttgtgcagaatgagcttgctgacacacagcctaaatttgtaccgcatgtttcatactaactccctctgagtttgcacatgggacccatgaggaggcatgaagaggtaactgcccatgcccgaggattttccagcccttccttttctttctatcaatcacctactaatcacagaatccactccctacaccttttctactaaaataactctttaaaataagtacaatgggacagatttgagctgggctcctgtctccttgttaatcaaattgcaataaaatgttttcttttgtttttgtttttgttttttttttggtgaaaaactcaagtgtcatagttttggcttctagtccattctgcagtgagcttctcttgcttgataac

SEQ ID NO: 4119 - DNA, 255 bp, Homo sapiens
  source 1..255: mol_type = other DNA
agttaaatccttatcttttgtaatggggaattattaaagatgttgtaaagtcagtaagtcaagaaattattgctcaaacatattatttaaagttagaaagttaccagacgatctaaaataaatattgttaaaagcattacctctagggaatgggatttagatttaaaaagggtgggatgggaaactgtgtttttcattttaagtccttctgtactatttaattttttaccttgtgcatgtattactttgaaaaaa

SEQ ID NO: 4120 - DNA, 677 bp, Homo sapiens
  source 1..677: mol_type = other DNA
gagaataagaagatctctttgaaaataaaataagactgctaaaagtatttggtatacagtctggaaaataaagttgagggaatctctccagataaagagcaaaaagaaatagatagaaaaatataaagaaagaaaaaagacatagacaatcaatatgtaatgttaggagttcctggaagagagaacagagacagtgtaggtgaagaaataaaaagaaaaagaattgaagaacagagcaagctaagtctccagattgagagggcccaatacaatctacatctagacacaatattgtaaaattttggaatattaaggatagaaggaagatattaaagtggccagggagaaaacaaatgaggtcatcacgattagctcaacacaaaaatggatgagaaatagactgctaacagatttgtcatcagcaacactgaatgccagaagtcaatggatcaacatcttcagagcttaaggaaaatttttgtacctagaatttcatagtaaggcagactgtcaagaagaacatcaaagtgaagacattttctgtcaggcaaattttcagaaagtctcctttgcacccttactgaggaagtatcttgaggaaattctccagcaaaatgaggatgaaaaccaggaaagaagaagaaatgggatccataaaacagtggaccttacttagg

SEQ ID NO: 4121 - DNA, 238 bp, Homo sapiens
  source 1..238: mol_type = other DNA
caggagttcgagaccagcctaggcaagatggcaacatcccgtctctacaaaataatttttaaaaattagccaagcatggtggcatgtgcctgtggtcctagctacttgggaggctgaagtgggaagatcacttgagcccaggagttcaaggcttcagtgagccatgatggtgccactgcactccagcctgggggacagagtgagaccctgtctcttaaaaagcaagaaaagaaagaga

SEQ ID NO: 4122 - DNA, 81 bp, Homo sapiens
  source 1..81: mol_type = other DNA
atttctaatttgagataatggagtaaacataagtttaccttccctccctccccaggccccactgaaattgaagtcaagaaa

SEQ ID NO: 4123 - DNA, 268 bp, Homo sapiens
  source 1..268: mol_type = other DNA
agacgcggtggctcatgcctgtaattccagcactttgggaggccgaggcaggcggatcatgagatcaggagatcgagaccatcctggctaacacagtgaaaccccatgtttactggcaggggcctgtaattccagctactcgggaggctgaggcaggagaatcgcttgaacccaggaggcggaggaggttgcagtgagctgagattgcattctagcccaggggacagtgctagactccgtctcaaaaaaaaaaaaaaaaaaaaaaaaa

SEQ ID NO: 4124 - DNA, 330 bp, Homo sapiens
  source 1..330: mol_type = other DNA
aggaggaataaatctgtcaatggtaggcacaggaactcaaaacaacaaagcaatgtggggccgttgagtacaggggaaaacgattttacaatgggtcaaagcccctaaagaaattaccatgccatagacagacgtactaaaatacaatataggaaaaaccaaactataataagcaaactactctaggaaaattaggaagtattaaatacattttcaaaatatgtgcctcaaaagtagttgacgcttttaaactgtgcttagaagtttcaattaccaggaaaatttactaagaaaccacattccctagaaatgccagaggaaaaaagtatt

SEQ ID NO: 4125 - DNA, 209 bp, Homo sapiens
  source 1..209: mol_type = other DNA
agagtttggactccaaagctcattccctgggttcagatccaagttctcccacttagcagctgggtgtgaagttggccaagttactgcacatctttgtgcctcactctcctcatgaaaaaaggctaattcaagagcctccacctcagagtcattgtgagaagtaaatttatttacggtgcatagacagtgcctgacagatggtaagcact

SEQ ID NO: 4126 - DNA, 299 bp, Homo sapiens
  source 1..299: mol_type = other DNA
ggcgctgtggctcccgcctgtaatcccagcactttgggagaccgaggcaggtggatcatgaggtcaagagttcaagaccagcctgcccaacatggtgaaaccccgtctctactaaaaatacaaaaattatccgggcgtggtgatgcacgcctgtaatcccagctactcaggaggctgaggcaggagaatcgcttgaacctaggaggcggaggttgcagtgagctgagaacacgtcactgcactccagcctaggcgacagagcaagactccatctcaaaaaaaaaaaaaaaaaaaaaaaa

SEQ ID NO: 4127 - DNA, 279 bp, Homo sapiens
  source 1..279: mol_type = other DNA
gacaacgaaaaagcaaagagcaaaatcaacatgatttggaaaaggaattttaaaccttaaattaaaaaaagaaaacattttcacacagaagaattatctgctttgagaaataaagaaattagaaggtgtaaaaaaaaatttttcaaaccccaaataatgataaaaatagatgtatcctctgtaaaaatctggactaaactattcagtcattcatggttattcagtattcagagcatgaagtgaaacaccaaagtataaaaaattaaaaaaaaaaaaaaa

SEQ ID NO: 4128 - DNA, 294 bp, Homo sapiens
  source 1..294: mol_type = other DNA
cgggcacagtggctcccgcctgtaatcccattactttgggaggcccaggtgggaggatcgcttgagcccagaagtttgagaccagcctaggcaacattgcaagactccatctctacaaaaaatataaaagtcagccaggcgttgtggtgcatgcttgtggtcccagctactttgggaggttgaggcaggaggatcgcttgagcccaggaggcagaggctgcagtgagccatgctcacaccactgcactccagcctgggtgacagagcaagatcttgtctcaaaaaagaaaaaaa

SEQ ID NO: 4129 - DNA, 124 bp, Homo sapiens
  source 1..124: mol_type = other DNA
ggtgctgagttcccttttctgagtggatttcaagcatttgccagggtatgctggaggagggactcctaaagtaggtgagatgtgggactaggtaacactttaaatacttttttactcaaagatt

SEQ ID NO: 4130 - DNA, 37 bp, Homo sapiens
  source 1..37: mol_type = other DNA
gtcctcggtttcctcatttgtgaaataaatgagtggg

SEQ ID NO: 4131 - DNA, 61 bp, Homo sapiens
  source 1..61: mol_type = other DNA
ctcagtgtccagcactgtgccctgcacatggaaagcccctacgtttgtggaatgaatgaat

SEQ ID NO: 4132 - DNA, 79 bp, Homo sapiens
  source 1..79: mol_type = other DNA
ccctctgagcagtttgcacctctaaaaagaaatccctgtcctgctgcttcccaaggtcacagtaatgatcaaatgagat

SEQ ID NO: 4133 - DNA, 436 bp, Homo sapiens
  source 1..436: mol_type = other DNA
gcaggacaagtctccggatggccttggccaacccggtgcttccctcttttcttggttgtagttctcagaataactagagaatgtactgggagtgttgtcctgagataaggaggaactgtcctaaacctggactctgttcccatcacacctagaacaggatgtcctgcaacgctttagcccaatgatccaagttgcccttggggtataaaacttgacagcagagggcgttcagggtccctcagctgcagtgtgaagtgggacacacaggtgagactccatctgccctgggcaggttcctgagccttgggggaccagttcaccctacatcccaggcttctgttgtcccttgcctgcctgtaaggaataaagttgctttgcttaacttgctgtgtgagtgttctgcatcactggactcgagcaagtggtacaaactgca

SEQ ID NO: 4134 - DNA, 499 bp, Homo sapiens
  source 1..499: mol_type = other DNA
gaaatgggcccaattgtcccatagaactgatgtttatggtttttcttgaataaacctagaaattgaccctctcagtcttgaaacccaaggagaaatttacatttatgtcatctgaattcctttctcaggaaaccagccagcaatcctcccagacggtatcaagaaactgaaatttaccagatccccacatctggaaagtgagaagccagacccctcacccatcatgattccccaggtgaccacctgctgcctgttggccaactcctcttccttgcccctcgttaatccctgttttcccacatgtagttacatttcttccctgctatataaacccctaattttagtcagttgatgatgatggatttgagactgatctcttgttcaccctgtctgtagcacctggataaagccttcttccctgacaatacttgtctcagtgactggctttctgtgagatgagcagcaagacctagatggaacccctggtgtttccgcaaca

SEQ ID NO: 4135 - DNA, 95 bp, Homo sapiens
  source 1..95: mol_type = other DNA
gagctccttgagaaaggtgatcatttcctatttatcctcatacttccagcatctcgttcaatgcaaatcacagatcacaaatgtttattaaatgg

SEQ ID NO: 4136 - DNA, 100 bp, Homo sapiens
  source 1..100: mol_type = other DNA
ggtcatgcgctgtataacaaggtttccatcaacaccgctctcacgtacaatcccctgagactacagtggggctgagaaattcctatcacctggtgacatc

SEQ ID NO: 4137 - DNA, 228 bp, Homo sapiens
  source 1..228: mol_type = other DNA
aaggaggggtaaatggttgttctgtttagttccagagaacagaacaaggcccaataggtagaaattataggaaagcagaattcattcattataaggaaggatttctaacaattagaatttctaacaattagaatcatccagggcctcaggaggtgcggaagttcctgtcacctaagtgctcaagcagaggccaggtgtccatatgctagaaatggagaaaaggaaact

SEQ ID NO: 4138 - DNA, 114 bp, Homo sapiens
  source 1..114: mol_type = other DNA
tgactgaggagaaaggacaccagtagcaggaagggcccggcacctcatcctaatctgtcccagtctagtgccaccaccctgggcaaagccctctgctgcttcagggcccagttt

SEQ ID NO: 4139 - DNA, 250 bp, Homo sapiens
  source 1..250: mol_type = other DNA
agtgtggggcaggggttgagagtgcgggccctgggtcagcctgcttatgtatcagtcctgcctctgccacttactatgcaacctggagcaagttaacacctcagggctcagtgtcttcatctctagagtggggatgaaaagaatacctatctcccagggctgccgtgagaagtcagtgaactaatacacataaagtgcttgggacagtgcctggcacatggtaagtgcccaataaatatcaactgctatt

SEQ ID NO: 4140 - DNA, 197 bp, Homo sapiens
  source 1..197: mol_type = other DNA
acttggagttaggatccccaggttctagtcctgagtctggactctgggtaagtgactcagcgattctgaaccttgtttccttatctttgaagtggagtgacaatacctgtcctatctactctcctgggcagttaggaaaatcaaattgctgcaaaagtgattgagcaaaattccaccaaaacagagaatattcttat

SEQ ID NO: 4141 - DNA, 118 bp, Homo sapiens
  source 1..118: mol_type = other DNA
gagtagcagaagcagtacacagtcatggtcttggagccaagagaccgaccaggattctagttcaggccctactgtggattagctctgtgctgcagccaatccatgttagcccccccaa

SEQ ID NO: 4142 - DNA, 65 bp, Homo sapiens
  source 1..65: mol_type = other DNA
gtacagaaggaataatatcaccattatacagctcttaaacaacggatttgaggaataatcatcaa

SEQ ID NO: 4143 - DNA, 305 bp, Homo sapiens
  source 1..305: mol_type = other DNA
gacacagcgactcacacctgtaataccagcactttgagaggctgtggtgggtggatcacttgagcccaggagtttgagactagtatgggcaacatagtgaaacctcatctctacaacaaatacaaaaaaattatctgggcatggtgatgtgcacctgtggtgatgtgcacctgtgatcccagctacttaggaggctgaggtgggaggatcacttgagcccaggagatggaagttgcagtgagctgagatcatgccactgcattccagcctgggtgacagagtgagactctgtctcaaaaaaaata

SEQ ID NO: 4144 - DNA, 457 bp, Homo sapiens
  source 1..457: mol_type = other DNA
atcatagtctcttagtaccgtttcccatgaagaggaaccaggactccttgggaaattgctgattcctggtctgggcattaaatgcccaagatgagcctggagtatctttggattccagaaatcagagactgcaaagactagcagggtcaggtcaaaaaaacatgggctgcctgccagccagcatgaccaatttaagcactgaagtttgaaacacatcaaatgttttaaatccatgagttaataatgacacttaagaaaatgaaaagaaaaagaaacctctttggtcacctttggagggtgatagtgaagcaactcatttattctgaaaacaagaaaataaggagaaagaaacaaagtattttattctaactttcctatacaaattgtacctccacatataaaataactgatgagcaaaaacaaatttttcagaattccagcaataaatgcagaaggg

SEQ ID NO: 4145 - DNA, 184 bp, Homo sapiens
  source 1..184: mol_type = other DNA
tgtttaacagcatggaatctggagtcagactatgtaattctgcttactaaatacttctcaatgcctcagttctttcactggttaaaaaagggggtgaggcaaagcagcttctcatacacatgttaaaaggacaaataacataagtgaagtgcttagaatagaggtctggtacacagtcaacact

SEQ ID NO: 4146 - DNA, 387 bp, Homo sapiens
  source 1..387: mol_type = other DNA
tataatctaatacggatacacgcttcaactataatggagtaggtgggaccagcctgttctcccataagatagtagaaaatgggacaaagtgtatgatacaactgttttcagatattggacaacacatagtacaggagacagtggtctctgagaggaaggaaacactcagggagtcctatgatattctgcctagaaacattttccagaatgctgcccagggagggagaacctcagcagagtacaatcaatggcctcgctgaggttagggaaggcaaggcagtggaatttgcaggacacagtactcaaaatgaagaagcaataacgactaagagctccagaaatctacaaaggatcccctgaagtctttggtggaacaccaagccgtac

SEQ ID NO: 4147 - DNA, 1147 bp, Homo sapiens
  source 1..1147: mol_type = other DNA
gacttccacttccagacaaaatgcagaaaatgtacttttccctgttctttccactaaatacagctttaaaaacccttagccgtgatacataagacaaacaaaagaagacaacaaaatgtagagagagggcagaccaattagggcttcaggagccaagaaacaaaagaggatgaattccctaggtttcctttctgactcatatatacaagaaaagttgctagagaagcagacaactcagaaacaccaacaggcacacacatacgtaaaactccaagaaaattctgctgtcttttgtcaaaaaagcagggaagcggcaggctaccaagacaaaaaactcatagacaacaacaaaccagtttaagccaaatggtacaaataaaagcccaagccatataccttttgcaaagacttaaaaggaggacatagtcagccattccccactcctgcccacggacaacatgataccacagcaggccaactgggacacaggacattcatacccactgagcagtaacgcggcttcctccctctagagtgtgggtggaaaaaaagtggggagcctgagttcaacacccacccagtgataaggacatatccctatccctccctctacagagatatgacaggagaggcctattggagaatccaaactcaaagcactgcccagtgataacttaaccacccctccatcccattcagtggaggccaagtgaaaagcaggaaccttttgagccagggtggtattcacaaaggtgtaatgcaagtccagagttttcactcctactcagcatttactaggtgtacgtctccatcaatgagtcaacaaaggcctactaaggaactggaatcttcacatacacctgggagtagtaacaaggctgtgccccacctccaccccaaaagcaaagtttcagataaatcctactaaaagggggtatttaaataaaatgcagagcttcataacacaacacttaaaatgcaaaggattcaaccaaatataacatgttataccatactaagaaccaggaaaatctgaacaggaatttgaaaatatagtcaaaaggtgcaaacaatgagaattcatagatgtcataattatctatcaaagattttaaactatataacactgcttcaacaagcaattaca

SEQ ID NO: 4148 - DNA, 302 bp, Homo sapiens
  source 1..302: mol_type = other DNA
ccggacacagtggctcacgcctgcaatcccagcactttgggaggcagaggtggttggatcacttgaggtcaggagttcgagaccagcctggccaacatcatgaaaccccatctctactaaaaatacaaaaattagccaggcatggtggtgcacgcctgtgattccagctactcaggaggctgaggcatgagaatcacttaaacccaggaagcagaggttgcagtgagctgagatcatttactgcattccaacctgggcaacagagcaagagtctgcctcaaaaaaaaaaaaaaaaaaaaaaa

SEQ ID NO: 4149 - DNA, 1899 bp, Homo sapiens
  source 1..1899: mol_type = other DNA
gaacatcaggcaacaaaggactgtagagctttgagaaatgagaaacaaaagaggtgagccctacatatgccccagcacacaacgataagagtttccaggccatggcatagagagtggcaactgaggcaaatctcagctgactcctgagttggaaagagaaagttaagagccaggagagaaaaaagcagcaaggaataactgcacagaatgctgagaggagacagttgcatagaaaagaaccccagaggtctatagagatcttctctcaagcattcaccagataactgatcagcatatgcatatgaggaaactatgagaatccagaaaaagaaccatcagaaacaatgggagggaacagggcctgatactcatacaaagccaggaatagtatctgttcccactagccaaactgggaaaactattaattcatggaacattcaacagagtccacagaaagtcttgcctcagtggtgaggaataattagtcctggactaagcactccttcatatctgtctaataaatcataaaaacaaaacccaaaagaatgaaacggtttataagtaactcaactacatctcaaaacaaagctcaagaagatttatagaataaagaaaatagccagaacccaaggtaaattttacaactaaataaagattaccaggcataaaaagcagcagacaatcatgatgcaaactgaaaataatcaatcaaaactgacccagaacttaaatagatgttaaaattagcagaggaggacattcaactgtttttatacatgtatcccatataatcaaaaagttaaatagagacatgggagataaacaagaaaagccaaaatcaaactttcaaagacaaaaacatttgagatgaaaattacattggatgaactaaagcagattagaaactgcagaagaaaagattagcaaacttgaagatacaagaacagacactagctaaagtacaaaaagaaaaaaaaaatcttaaaaagtgatttttaaaaagcatcagtgagcagtcaggcaacttcaaatagcctaataatatgcaggtaactggagtccccaaaggagaaaaaagaggaagagaaaaaaaatacttgaagaaacaactgctgaaaatgttctagccataaaaagacctattaactcacggatccaagaaactcagcaaaccccaagcacaagaaacatgaagaaaattacattaagggataacataatcaaattgttcaaaatcagggatatattattaatagcagctgtataaaaagacatgttacctatagaagaacaaagataagaacaacatcagatttcttttgagaaacaatgcaagtgagaagacagcagtacatctctaaagttctagaagaaaaaaggccaactagaattccatgcctggcaaaaatatctttcaaaaatgaaggtgaaataaaggcacaccagaaacataaataatgaaataattcatcaccaggagactttcactgcaagaaatgttaaaggatattctccagaaacaaaatgatgtcagatgaaaatctggatcaatacgaaggaataaagagcaccacagtggtaactatatgagcaaacatcttttaaattttttattatttaaatctctaagagatatatgtttaataaaagacagcaaaatattacagagtttataacatatataaaagtcaaatgcatggcagcaatagcacaaagtgcacgagggaggaaaagaaagcaaatgaaggaatgcttttattatagatgaagtgtacaatattacttgaaggtagacctctctaaatgtacactataatcttaaagcaactacaaaaataatttttaaaaacaggtaaaagtaataaaaagaggcaaactggaatcataataaataatgta

SEQ ID NO: 4150 - DNA, 302 bp, Homo sapiens
  source 1..302: mol_type = other DNA
gccgggcgcggtggctcaagcttgtaatcatagcactttgggaggtcgagccaggtgggtggatcacctgaggtcaggagttcaagacgagcctggccaacatggcgaaaccccgtctctactaaaaatacaaaaattagccaggcgtggtggtgcatgcctgtagtcccagctacttggggggctgaagcaggagaattgcttgaacccaggaggcggaggttgcagtgagctgagattgcaccactgcactccagcctaggcaacatgagactctgtctcaaaaaaaaaaaaaaaaaaaa

SEQ ID NO: 4151 - DNA, 938 bp, Homo sapiens
  source 1..938: mol_type = other DNA
ctatgcatatgtggtcaaatgattttagacaaagtcatcaagatacttcaatagggaaataacagtcttcttcaacaaatgatgtgggaataattgatatccatggagtgagaggatgaacatttatttactttctcatttcatatacacaaattaactcaaaatttatcactgagttaaatgtaagggctaaaagtacaaaatttctttgaaaaaccattttttaaaaacttcgtaattttgtggtaggcaaaaatttcttagctagcacataaaaaagcatgaaccataaaagaaaaaagttgataaatgggcttccatacatttctgttcttcaaaaaccaccaagaatatgaaaagacaagccacagactagcaaaaaaatctgcaacacataaatctgacaaagaatttgtatccaggatatctgaagaactcttactattgagttgtcacttaataaacaaatcagttaaaattgggcaaaagattcaaacggacatttcacaaaagaaaatatacaaatgaccactaagtacaggaaaagacagtcaacaacatttgtcatcaggatcatacagcttaaatccaccacacaccaagtttgggttaagacgaacaactgcaactcttgtacactgttggtgggagggtagatgctgtaagtactttggaaaaacttaccatacaacaaagcaactgcactcctgggtacttcccaaggagaataaaacatatccagcagacactcagtacatttccaatgttcatagcagggttttttgtaatagctaagactggaaacaactcaaatgtccaccagcaggggacggctgacttgtggcacagccgctcgctgaggctctcccagcagaaagaagggtcaaatgacatgcacacctcaaaagcaccgagtgaaggaagccggaaacagagaa

SEQ ID NO: 4152 - DNA, 297 bp, Homo sapiens
  source 1..297: mol_type = other DNA
gctggacgcagtggctcatgcctgtaatcccagcaccttgggatgccaaggcgggttgatcacctgaggtcaggagttcgagaccagtctgaccaacatggtgaaaccgggtctctactaaaatacaaaattagctggatgtggtggtgggcacctgtaatcctagctatacgggaggctgaggcaggagaatagcttgaaccacctgggaggcagaggttgcagtgagccaagatcctgccattgcactccagcctgggaaacaatgagactccatctgaaaaaaaaaaaaaagaa

SEQ ID NO: 4153 - DNA, 957 bp, Homo sapiens
  source 1..957: mol_type = other DNA
aaccaaaaagaagaagtatttgcaatgcttattaactgacaaaggactcatatcctggatatattaaaaggtttgacaaataaagatattaaaagtcctggacactacaaatgacaaatgggcaaaaacattaacacgcacgtcacaaaagaaaatatccaaattactaagaaacatataaaagctttccttttcactgtcattagtttttgaggcaatgcaagatacccgtataccgtcatcagaaatgttactcaaaagtgaaataaaacaaaatataacctgacaatatcaaatggtaagaagaatgtgaagcaacaggtcactcacatcctacttgtgtgggagtaattttgtgcagcctctgtttatcaggttacacaaggctgaatacacacattctaataaatctactaaggctaaacatataccttctaataaatctatcaagtttctagatatatagccttcagaaattcttacatgtgtaaatcaagactgtaatgagaatggtcataacatcattatttatgttagtgcctatccaagcaaaaaaaaaaaatccaaattgactcaacaatagcatggattgattatgaaatgttcataccatggaatgccatgcagtgatggaagctgactacagctacatacaatatctccgagtctcccaagggagacagagtgaaagaagccattcacattgattccatttatatggagttcagaagtctccccagctaactagcgttagaagtcaggatagtgattttctcaggggagaaatgggattgtaactagaagaatgcaccaagaaatcttttgagacaccgcttatcttgtatgtcttcatctggttgtgattacatggatgtatgcactttgagataagttattaagttgtagacttatgacttaggcacttctctctaaatgtcgtacttcaacaagatgttt

SEQ ID NO: 4154 - DNA, 305 bp, Homo sapiens
  source 1..305: mol_type = other DNA
gctcatgcctgtaatcccagcactttgggaggctgaggcaggtggatcacttgaggtcaggagttcgagaccaacctgcccaacatggtgaaaccccagctctactaaaaatacaaaaattaaccatgtgtggtggcacacgcgtgtagtcccagctacttgggaggctgaggcacgagaatcgcttattgcttgaacctgggagacggaggttgtagtgagccgagattttgccactgcactcgagcctgggtgacagagtgagactctgtgtcaaaaaaaaagaagaaagaaaaaagaaaaaa

SEQ ID NO: 4155 - DNA, 1073 bp, Homo sapiens
  source 1..1073: mol_type = other DNA
cctttatctaattttacttttcagccacgtttgatgtagctgacttccatctcgaaacactctcttctgattttccctttgattgcactatccactcctttttccatgtcctcgaccggttctgtcttcccgcgtgacctctcagcattgaagtcttatctgcctgccctcttctggatgcattgtattcctggatgagcttctcaatgccctagtctcatatactggccatatgatgaggattcctggttttacatgtcaagccttgtctccgtaagtgaactgcaaactcagttttcaaagtgcccatctgaccactccactctgatgtctaacatgtgctcgcttacatgtggccagaagagagctcctcatccccatggccatcgctcctccaccagtgttccatctcagtaaatggcaccaccaccaacccaggtgctcaagccacaagccctggagttgtcgttcgttcactttccatttcacctcatctaaccattcagcaagcctcatcgatcccatctccaaaatatacccctaatccatgcagtacacccacctccccactggggctgcaccagtccagccccagccactgttgtctctcactggaatctctgaagtcactcccaagaggtccctgcttccactccccctcccacacccattctccctaagacagccacagggatcctgttgaaacaagtcagatccatcaccccctggagtacctggcctcctttgcacatctcagaccgaagctccttactgacctctaatggtgtgcacgccctgttcctcggcccttataagaccccttttccctgcacactccatgctctggccatatcggcccacgttctattcctcgaatatatcacattccttctgcatcagtgcctttgctcctctgccccgaaggctctctcatagatcttcccgccattcaagtcagccccatgatacctccgcagtgacgcattccttgaccactctacctaaaatctctctccccccgccacacaatctctttgtcttgttttatcttcttctcaacacgtatcactatc

SEQ ID NO: 4156 - DNA, 202 bp, Homo sapiens
  source 1..202: mol_type = other DNA
gatctaataagtttggaaaattctggattcaatgcaatttgcttacttatcctaagatttagaagctattttaagctgaaattctccacggctcccagaaggggtgtgatatgcagttttagcccaaacttaccttgccatgatatcttctttccaggaacgtcagttgtgactgataacatgctggacccgtgttgggaaa

SEQ ID NO: 4157 - DNA, 602 bp, Homo sapiens
  source 1..602: mol_type = other DNA
ttcaaggaggaaggatcgtcttttcgagaaatggtattggaatgactagatagccatatgcagaaaaaatgaacttcaacccgtacttcatacaatatacaattatctcaaaatgaaccacagacctaaatgttaaaacttctagaaaaaaaagatagaagagaaccttgtgaccctctctactaggcagagatttcctaggcagtcaccaaaagcataatctataagagaaccaactggcaaactggacgtcatcaaaatgaggaattttattttctaatgatactgttaagagaatgaaagaaaagaagagctagagtgagagaaaatatttgccaacgatatatttgtcaaaggaattgtatccagaatatatttcttgaaactctcaaaattaaatggtaacaaaataaaacaagacaaaatccaattatacaactgacaatggatttgaccaggtattttaccaaagaagacagaggagagacgaataagtccacgaaaaacttttcaacaacatttctcactaggcaagtgcgaacgaaaccacaatgagatattgctatacgcctattggaagggataaagaaggaagtctgaca

SEQ ID NO: 4158 - DNA, 198 bp, Homo sapiens
  source 1..198: mol_type = other DNA
cttgaactctggggccaggctgcagaattgagtgccagcttttcttcttactaactggataacttctggcaaaatttaaaatagcagtaattgcagtatctacctgataatggtgttggaaggattctatgattaatacctaggaaaaacttgtgagtgtctggtgcattctactatgcaataacattagttattttt

SEQ ID NO: 4159 - DNA, 378 bp, Homo sapiens
  source 1..378: mol_type = other DNA
agttgacccttgaacaacacgggtttgaacggagcagttccacttatatgtggattttcttctgcctctgccacccctgaaacagcaagaccagcccttcctcttcctcctcctcatcctactcaacatgaagatgaggaggataaagatctttatggtgacccacttccacttaatgaataatattttctcttccttaggattttttaataacatttctttcctctagcagtcactttattgtaagatcactttattgtaagatcacagtatacatacacagaaaatgtgtgttcatcgactgtttatatcattggtaaggcttcctgtcagcagtaggctattactagttatgttgtggtgaatcaaaagttacac

SEQ ID NO: 4160 - DNA, 1057 bp, Homo sapiens
  source 1..1057: mol_type = other DNA
cttttcctctagctctgatagagtgactggcattgggcatttcctcctggcataaacaactctaaagctggtaaaatgtgcatgacaaatgttttaaggcattaaacaacaggcagcacagaactgtaattcttgagagaaaggaaacatgagaggtgaggctcagtttgccccagtgctctgcctgggaccgtttcctgcacatctccagcagaactgtggcctcactgacctgaggaggagattggagctgtggtctcagaagcagctgagatttggggagccaagtgcaagagcagaagctgaggacaagggtttccagaagtcttgatgaagactcattgctggtttttggctgaaggctgcccacaccatggcaggcagtacacagggcctagcagtggttgccttctgcagggctgggaatgaatgaaggcattattgctatgcaccaccaggagatgctggagctccagctcagccagaatggagagaactcattgagcatctcagtcaggcattcagttgaaacctcagaaagtccacaccatagcagtaaaagctataccctcaaataagggccacaccttagcccataactagaataagttcatgtccatgaaaggaaagacatgaagcctggtatgaccaaaaagatcagttggtaatttccctgctgccaaaacaaaactcagagcacttctaatttaaaaagagattatctagaatcatgaaaacattttgtctatagtatccagaataaaatttttttaaaaaattgctagagtttcaaagaaacatgaatataagacccatgatcaaggaaaacaacagtcaatagaaacaagccctgagattaaatgcctttgatgttgaaattttcagacaaggattttaaggcagttataaatatagccaaggaattaaaggaaaacatggtcataatgagtaaacagagggaaagttgcagtagagaaattataactgtaaaaaataaaattttagaactgaaaatatgtagtagatgggtataataatagttaagaatggcagaaga

SEQ ID NO: 4161 - DNA, 287 bp, Homo sapiens
  source 1..287: mol_type = other DNA
gaagcacccatcaggggccatgtgtggaccaagcatacattccggctctgcctgagtccacattcagcatcacctggactcagtaggatctggggcagcaacggtcagccagcagggtgacgtcacacatgtgcacctctcctgcagtattcaatgctgctgtccccccaaccacacaggagctgccttctcccccagcactgctgccagatgacagcttggtgcagggagcaggacatccacaagtgggtgtggaatcttccctgcccgatgcctctcaggagcca

SEQ ID NO: 4162 - DNA, 300 bp, Homo sapiens
  source 1..300: mol_type = other DNA
gccgggcgcggtggctcacgcctgtaatcctatcctttaggaggccgaggtgggcggattgcctgagttcaggagttcgagaccagcctgggcgacacggtgaaaccccgtccctactaaaatacaaaaaattagccgggcgtggcggcacgcgcctgtagtcccagctactcaggaggctgaggcaggagaatggcttgaactcgggtgggggaggttgcaatgagccgagatcgcgccgctgcactccagcctgggcgacagagcgagactctgtctctgaaaaaaaacaaaacaaaa

SEQ ID NO: 4163 - DNA, 5903 bp, Homo sapiens
  source 1..5903: mol_type = other DNA
gctaaggattttgagatcgtgagttctctttttgcttttttgcctcattaataccagaattgaagaagccagaaatccaacacaccaatatatacacacaaaaaatgtctaacagatgtttgctgtttttagacaaagatccaggaaaggaggagcctcacaaagcataacaatttaagacagcaacccctctactccagtcaaacaccgtaggaaaaaatcccatggctgcttctgcatccacactagtgaaggctgagtgaacagcctagacttccaccctcaccaggctttaatgagaaccccaatcttcctcccacctcccctgcaggctgaagtcagagaaacctgaataaggacccagagccaactggcagtaatgagttactcatcctgttccccaaaaggatggtttcaaaggaggcctcgtagaaagtctctactttcagaaccacacagtgttaacgaggacgactccacctacccactccgtggtattagtaaaaagttagtcttatccttgccagctaaggtggcattatcagaggccgagtggggagctagaaatcctacctccagctggcagtaatcaggaaccttctccacttttgatgtaaactgaggctcagtggggaacttctacttcaggtagcactaaggagcctgctccacctgccttgcccctcattccctcactatcacagcagtgtcaaaagaagctgctgaaacagaaggtttaaataagagtaccatacataatactaaaactatccaggtttcagttaaaaaatcactcatcagatcctgaccaataactaggtaaatctaaagttgaatgaagagtgaccatcattgcatcttaaaattgagataatagagaagttagatgtcataattggctaaaaatgttttaaatcaataatcataaaatcttttcaatgattaagtacaaacatgcttggaacaaatgaaaaaatagaacatctcagcaaagaagcaaaaaattcaacaatgctctagaagacataaaggagaaccaagtggaaattataaaactaaaaatatactagccaaaataaaatctcaatggatgagcttaatagcaggatggacagtacaaagggaaaaactggagaatgtgaagatggaaccatagaaattatccataatgaatgataaaaagaaaattgaaaaaaaatttttaccatatggatctgtgagactgtgaccaaaagcaatctaatatttgtgtaattggaattcctgacggggaggagaaagagggtgaaactgacagagaaattgttgaaataatggctgaaattttccaaatttagcaaaagacataaacctgcaaaaacaagcagctgcgagaatcctaaaaaggataaacacaaataaatttacactaaacgcatcacagtcaaacttctgaaaactaaagacaaagaaaataaaattaagtctaaatcagtgaaagagaaacaataccaatgaagagcaatttttcaatgatagtaaatttcacattaaaaaccatggaggtcagaaagaagtagtacaacattttccaagtgcagaaagaaaagaacagtcaactcaggatttggtactcagaaaaaatattctcaggaatgacagggagatcatgacattctcaagtgaaggaagactaagagaattttcctagcaggactacccagaaagaatgactaaagaattttttttttggacaaaaaagaaatgataaaggaagtaatcttagaacatcaaaaggaaaaagaacaatggcaagggtaaaattataggtaaatacaatacattgtctttctcttttgagttttatgttattattgttacataaagcaaaagttataatgttgtctgatgtggttttaaaatgaatataaaggaaatatttaagataatggttttataaataggggaggttaaagaggaataaagggaggtcaggtttctacacttcactcaaactgataaaatgaagacaccagtagactgtgattatttatatccagcacaacatcaaagagatacactcaaaaacatgagacaaatcaaaactgtattctaaacaaatgtttaaccaagggaatggcaggaaaaaaaaaaagaaaaacatgaaaaaccaaggaaacaatgaaaaaacaaaaagtaaaagggcagatgtaagctctagcatacaataattatattaagtgttagtggcctaaaaacatagcaattaaaagtcagagattgatagagtggtttaaaaaacttcatgaaccaaccatttattgtgtacaagaaactcactctaaatacaatcataaatctaggttgggagcaaagaaaattaaaataaaaaaggatttaccaggcaaactttaatcaaaagaaggaaggagtgggtatattaatatgagataaagtagactttagagaaaaaaattaccagagacagagagagatattaaaaatgataaaagtcaattcattgagaagatgtaggtatcctaaatgtatattcaccaaaagcagagcttcaaaatacataaaacaaaaactgatagaactaataggagaaattgataagcccattattatagttggagattttaatatccctctctcaatcgataaaacagctagacagaaaagtagcaaggatataaaaaaacttaacaacaccataaaccaacaagacctaatggacatgtatagaatattctatcctgaaacagcagaatacacatatttttaaagctcactaagtatatatcaaggtacaccataacctgaactataaaacaaatcttaacaaacttaaaagaattggaatcttacaaaatgtgttttctaaccaaattgaaattaaactagaaattaataacaagaaaatttccaaacacagaaattacacacacttctaaatattatgggtcaaaaaggaaatcttggtagaaataaaaaatacattgatctgcaagaaaatgaaaatacaacattgttaattttgtgggatctaattaaagcagccccaagatggaaatttataacagtaaatgaacattgggaaacagaaaaggtttcagaacaattgtctaatctctcgtctagacaaaaagagcaaaataaactcaaagcaagcaaaaggaaggaaatagaaaagataagagcagaaatcaatgatgttgaaaatatataaaagtaataaagaaaataagtgaaataaaaagctcgttctttgaaatgatttttaaaactgataatcttctaggaagacagataatgaaaaacagagaagccacaaaaatgccagcattagttattatataagagatattgctacaaatactgtagacatcaaaaggacaaaaagaaaataccatgattaattccactcaaataaatttgacaatgtagaggaaatggacccactttttaaaaagcacaaactagtgcaattcacccaatatgaaaaaaatttttgaatagttctaaatttatttaggaaattgaatttatgatttaaaaatgtcaaaaaaaatatatacaggcccatatgatgtcatttgagaattctaccaaactgaaataagaattaacataattctatacaatctcttccagaaaatagcagaggagagagtactttccaatttacttcataaagatagtattattgtaatatcaaaagcagacagtcagtataacagaagaaaaccacagagttatattgctcattaaaatagatgtaaaattcttaaaataatagcaaataaaattcagtagtatataaaaataattatatactatgatcaagtagtgtttactgtagggttgcaaggctgattaaatatttaaaaatccatgtaattcaccatattaaaagcaaaaatattctcatgattaaaccagttggtggcggaagaaatatttgacaaatttcaagatgcatttaccatagaacctctcagaaaactagaaatggaggcaaacttcctcaacttgataaaaataaatttactggcagcctacaattaacatactaatgatgaaagactgaatgttttacccttaagatcaggaatgtcctccctcaccactcttattcaacataagactgaaaggtatagccaattcaataaggccagaaaaggaaataaaatgcatacagatcagaaaggaagaaaaaaaagcctgttcttatttgcagatgatacatgtgttttcaaggaaaaaccatggaatttaccaacaaaatcccccaaatattagaacttatatgtgagtacagaaaagtagtggaataaagataaacatacaaaaattacataattttatttctgttaactggcaattaacacatgtactctaaaattaaaacacaattcgagctccaatagctcaaccagaaatatcttaggtataaatctaacaaaacattcacaggatctgcatgcagaaaactacaaaatgctgaaggaaatcaaagaagatctaaatagatggagagacatattgtgtttatggactggaaaatttaacatagtaaagatgtcaatttcccccaatttgctgtaagttttatgtcagtctatcaaattcccaacaagaatttctgtagacatgggattttctaaaatgtatatgaaaagcagagacactagaatagctaaacgattttgaacagggagaatgaagtgataagaagtagcggattctattttgatgtattacatacctacattaatcaaaactgtgtggtattggtggagacacagaaacatatattaatggaaaaaatagaaaatcaacagtggagaaagcatactcttttcaacaaatggtgccaaggcagttggacaaccataggtaaaaaacaatcttgatctaaacctcagaccttatacaaaaattaaatcaaaaggaatgatggatgtaaatgcaaaacattcacttatgatacttagaataaaatgtatgagaaaatcttttgaatccatagagcttggtgaagagttgttagacttgacatcaaaagcatgatccataaaaggaaaaattgatagagcagacttcatcaaaattacaagtttttgctccgtgaaagaccctgttaagaggatgaaaagaccagctgcacaatgggggaacatgttaccaaaccacatatctgataaaggacgaacatcaaaaatacataaagaactctcaagtctcaacaataaaaaaatcaaatacgaaagtgggccaaggatagaaagagattttttatcaaacagaatatgaagatggcaaataaatacatgacaagtgttaaacattattatctgctatttggaaagagcaaattaaaaccacactgttatgacactacacagccatcatacgagctaaaattgaaaaatggtgattctaacacatgatggcaagcatgtggaaaaactggatcatccagacaccaccgctagtgggaatgtaaaatggcccagccactctggaaaaaagtttgacagtttcttaaaaaaacaaaacatgcaactatcatatgactcaccagttgcacttttgagtatttatttcagagagatgaaaacatgtttatacaaatatctgtgcatgaatatccacagaagttttaatcataataaacaaaaactggaacagtgcaaatgctcttcaacaggcaaatggttaaacaaacagtggtacatccataacatggaaaaccactcagcaattaaagaggagggagctgttgatgtatttatagcaacttggatgaatctttaaagaattatggtgagtgaaaaaagtcattccccaaagactaacaatgtattattccatataaatagcattctctagaggacaaaaattacagacatagagaa

SEQ ID NO: 4164 - DNA, 588 bp, Homo sapiens
  source 1..588: mol_type = other DNA
tccacattcaggactgcaaatgccacctcttggttgacgactcccaaatccttacctccatctggggtttctgctatggaggcccctagctcctgggcatctccacaggcaccacaagctcagcctgtcctcactggaacacactgggctgctcccaaccctccctgctcctatcctcgcctggcaagtggtgcccagtcaccaaccagacatgctggtggaggcagaggccaacctaggctcctccctcccactgctcctataattgatgagctcctgggttttttaagttctacccctttagcctgtgtccagccctctgtacctgtaattgctgcctttgttcagatcctggttgttcatgtcagtcactccagaagcctcctaactgctctccctgactccagcctcccttcctctgttcccaacttacgccactgccacactgacccatctacatcacagacaagatgtgctgctcctcggctcaacgtgctgcaatggctcctgaccacctttatgctaatgtccacaccctttagcacggcagacagactcgttagggcctgactcacctgcctccctcac

SEQ ID NO: 4165 - DNA, 296 bp, Homo sapiens
  source 1..296: mol_type = other DNA
gccaggcgcggtggctcatgcctgtcatcccggcactttgggaggccgagacaggacgatcgttgaggccaggaattcgagaccagcctggccaacatagcgagacccccatctctaccaaaaaaaaaaaaaaaaaaaaccagcagggcgcgcctgtggtcccagttactcaggaggctgaggcgggaagatcgcttcagcccgggaggtcgaggctgcggtgagccgtgatcacaccattgcattacaacccgggcggtagagcgagaccctgtccgtaaaaaaataaaacagaa

SEQ ID NO: 4166 - DNA, 336 bp, Homo sapiens
  source 1..336: mol_type = other DNA
catatttccctccctgaggccctgggaattggctcagcaccttctcagtgagaccttcctaattatcctacttaagatcatacctccttctccagtattcttgactacccatctgggtttctttctctctacagaaggtgctagatacttagtgctgtctggtgtgctatacattctgtttctttaatttgtcaaatgtcttgtctctctccattagaacgaaagctccatgagagcagatctttttgtttggttccctgccatatccccgaggcttacagcaataccaggcacagtgtaagagttcagtatgtattcactgaaggagaggatgaa

SEQ ID NO: 4167 - DNA, 416 bp, Homo sapiens
  source 1..416: mol_type = other DNA
aaatgccacaattcccaccttctcttgtaatgatgatgattgcataactaacgatgatgatttaaatggaagcagaagtttctgaatggggcttctgtgaaagttttcaaaaaagttttcttgttttcctttttattccccttatgcccatcctgcctctttctgcctggaacatggctgtaatgtccagacctgcagcagccatattcagacttgagggaacttgtctcatagaagccgaggctaaacacaaccggagaaaaggagcccaggcctctcagaataccaaggagtccctgtatctgctcgtttactctcagaactgggtctgatgtgaaaggaaagcttactcgaatcttacttcgtcctgttttcaaagaccctcttacttgcagataaacacaattcctaactga

SEQ ID NO: 4168 - DNA, 224 bp, Homo sapiens
  source 1..224: mol_type = other DNA
cagcctagtttatgtattgaaagagcaggctctgaagaaacactgagttggattcaaatcctagttccaccagtttctaatgttataaacttgcacatattacctaatcactttgaacctcagatttccatacctctaaaatggaaatacaaattgaacccgcctcacagtcttgtgaggatgaaatgaagcaatgtgggaagcactgggcacagaggcatggc

SEQ ID NO: 4169 - DNA, 392 bp, Homo sapiens
  source 1..392: mol_type = other DNA
tgctatcgactgaattgtgttccgaaaaattcatatgttggagccctaacctccaatgtgacagtatttgaatagggggtctctgagagatatgattaggtttagatgaggtcatgaggatggagccgacatgatgggattagtgcacttctaagaagagatactggagagctttcactctctcactcttttgcatgtgtgttctctctcttgatcactttctctctgccctgtgtggacgtagcaagccaggatgagacctctcaccaggaaccatatctactagcctcttgatcttggactttccatcccctagaaccatgagaaaataaatttctgttgtgtatgccacccaatcaacgtactttgttatagcagccaaacagactaag

SEQ ID NO: 4170 - DNA, 306 bp, Homo sapiens
  source 1..306: mol_type = other DNA
gcctggcatggtggctcatgcctgtaatcccaacactctgggaggccgaggagggtagatcacctgaggtcaggagtttgagatcaacctgtccaacatggcaaaaccccgtctctactaaaaatacaaaaattagctgggcacggtggtggatgcctgtaatcccagctactcaggaggctgaggcaggagaactgcttgaacccgggaggcagaggttgcagtgaaccctaattgcgccattgcacttcagcctgggtgacaagagtgaaactccgtctcaaaaaaaaaaaaaaaaaaaaaaaa

SEQ ID NO: 4171 - DNA, 155 bp, Homo sapiens
  source 1..155: mol_type = other DNA
gaggtagcatgatattgtgcaatgaacactggcctgacaatgagaagataaaaactcctttccaatgtggccactttatcacttgagtgttttctgagaaatcgtttaagttttctgaggctcagttccctaactcactaaaaaggagaattagc

SEQ ID NO: 4172 - DNA, 81 bp, Homo sapiens
  source 1..81: mol_type = other DNA
tatggcatacctacaggggaattccttcgcaccatagcctgtatgaacagtgttccctggagttctccagtgctcagcttg

SEQ ID NO: 4173 - DNA, 75 bp, Homo sapiens
  source 1..75: mol_type = other DNA
atttcattgattccaagacatcactttttcaatttaacatctctgaaattgtgacatttcttgcaactgttggca

SEQ ID NO: 4174 - DNA, 298 bp, Homo sapiens
  source 1..298: mol_type = other DNA
gccgggcatggtggctcatgcctgtaatcccagcactctgggaggccgaggtgggcagatcacctgaggtcaggagtttgaaaccagcctggccaacatggcgaaaccctgtctctactaaaaatacaaaaattagccaggcatggtggcaggcgcctgttaatcccagctactcaggaggctaagacaggagaatcgcttgaacctgggaggcggcggttgcagtaagctgagatcgtgccattgcactccagcctgggcaagagagcgagactccatctcaaaaaaaaaaaaaaaa

SEQ ID NO: 4175 - DNA, 151 bp, Homo sapiens
  source 1..151: mol_type = other DNA
ctgagcgtggtggcacacgactgtaatcccagttactcaggaggtaggagaatcacttgaacctaggaggcaaaggttgcagtgagccgaggttgcaccactgcactccctcctgggcaacagaacaagactccatctcaaaaaaaaaaaa

SEQ ID NO: 4176 - DNA, 132 bp, Homo sapiens
  source 1..132: mol_type = other DNA
ggctgggtgaggccactcatgcctgtaaacccagggctttagaaggctgaggctgggggattgcttgaagtcaggagttcaagaccaacctgggcaacatagcaacaccccccatgtctacaaaaatgaaaa

SEQ ID NO: 4177 - DNA, 299 bp, Homo sapiens
  source 1..299: mol_type = other DNA
gccgggtgcagcgactcatgcctgtaatcccagcaccttgggaggctgaggcgggcggatcacaaggtcagcagattgagaccatcctggctaacacagtgaaatcccgcctctactaaaaatacaaaaaattagccaggtgtggtggtgggcacctgtagtcccagctacttgggagactgaggcaggagaacggcatgaacccaggaggcggagcttgcagtgagctgagatcgagccactgcactccagcctgggcaacagagcgagactctatctcaactaaaaaaaaaaaaaaa

SEQ ID NO: 4178 - DNA, 510 bp, Homo sapiens
  source 1..510: mol_type = other DNA
agtagtcccccttatccatggttttgctttctgtggttcaaaaacattaaatggaaaattccagaaacaaacaattcatatgtttgaaattgtgtgctgttctgagttgtgtgatgaaatctcacgtcatcctgctccatcctgcctgggacagaaatcatccctttgaccagcatatccatgctgtataacctacctgcctgtcacttaagaaaccatcctggttatgaagtggactaccctagtattgcagtgctctgttcaagtaacccttattttacttaataatggccccaaaatataagagtagtgatgctagcatattgttaaagttgttctattttattattattgttgttaatcttttactgtctaatttagaaattaaacttcatcataggcatgtatgtatcataaaaaacacagtatatataggattcagtactatctgcagtttcaggcattcactgggggtcttggaacgtatcctgcagataagggtgggctact

SEQ ID NO: 4179 - DNA, 49 bp, Homo sapiens
  source 1..49: mol_type = other DNA
ctgtggatgctgtgaagaacgccgacggctacaagcttgacaagcagca

SEQ ID NO: 4180 - DNA, 4030 bp, Homo sapiens
  source 1..4030: mol_type = other DNA
tcaaaatgggcaaaataaccagctagcattataatgacgggatcagattcacacataatattaaccttagatgtaaatggctaaatgccccaattaaaagacatagaccagcaaattggataaagaatcaagacccaccagtctgctgtattcaggagacacatctcatgtgcagtgacacacataggctcaaaataaatggatggaggcagatttaccatacaaatgtaaagcaaaaaaaaagggattgcgatcctaatctctgataaaacagacgttaaaccaacaaagatcaaaaaagacaagggcattacataatggtaaagggatcaatgcaacaagaagagctaactatcctaagtatatatgtacccaatataggagctcccagattcataaagcaagttcttagagacctacagagacttagactcccacaccataatagtcggagattttaacaccccaccgtcaatattagacagctcaacaagacagaaaattaacaaggatattcagaatttgaacttagctttggaccaagtggacctaatagacatctacagaactctccaccccaaatcaacagaatatacattcctctcagcgccacatagcacttattctaaaatggaccacataattggaagtcagtcctcagcaaatgcaaaagaacggaaatcataacaaagaatctctcagaccacagtgcaatcaaattagaactcagggttaagaaactcaaaaccatacaactacatggaaactgaacaacctactcttaaatgactactgggtaaataatgaaattaaggcagaaataaataagtactttgaaaccaatgagatcaaagacacaatgtaccagaatctctgggacacagctaaagcagtgtttagagggaaatttatagcagtaaatgcccacaggagaaagcaggaaagatctaaaatcaacaccctaacatcacaattaaaagaactagagaagcaagagcaattaaattcaaaagctagcagaagacaagaaataactaagatcagagcagaactgaaggagatagagacatgaaaaacccttcaaaaaaacaatcattgaatccaggagctggttttttgaaaagattagcaaaatagatagaccgctagccagactagtaaagaagaaaagagggaagaatcaaatagatacaataaaaaatggtaaaggggataccatcactgatcccgcagaaatataaactaccatcagaaaatactataaacacctctctgccaataaactagaaaatctaaaagaaatggataagtaattcgtggacacataacaccctcccaagactaaaccaggaagaagtcaaatccctgaatagaccactaacaagttctgaaatagacagtaataatagcctaccaaccaaaaaaagcccaggaccagacagattcacagccagattctaccagagatacaaacaggagctggtaccattccttctgaaactattccaaacaacagaaaaagagagactcctccctaactcattttatgaggccagcatcatcctgataacaaaacctggcagagacacaacaaaaaagaaaatttcaggccaatatccctgatgaacatcgatgtgaaaatcctcaataaaatactggcaaaccgaatccagcagcacattaaaaggcttatccaccacgatcaagttggcttcatccctgggatgcaaggcaggttcaacatgcacaaatgcataatataatccatcacataagcagaaccaatgatgaaaatcacatgattatcttaatagatgcagaaaaggcctttgacaaaattcagcccctcttcatgctaaaaacactcaataaactaggtattgatggaacatatctcaaaataagagctatttatgacaaaccaacagccaatatcatactgaatgggcaaaagctagaagtattccctttgaaaactggcacaagacaaggatgcactctctcaccactcttattcaacgtagtattggaagttctggcccaagagaaggaaataaagcgtattcaaataggaagagaggaagtcaaattatctctttttgcagatgacatatttagaaaaccccattgtctcagcccaaaagctccttaagctgataagcaacttcagcaaagtctcaggatacaaaatcagcgcgcaaaaatcccaagcattcctatacagcaataatagacaaaaagagagccaaatcatgagtaaacttccattcacaattgctacaaagagaataaaacacctaggaatacaacttacaagggatgtgaaggacctcttcaaggaaaactacaaaccactgctcaaggaaataaggacacaaacaaatggaaaaacattccatgctcatggataggaagaatcaatatcatgaaaatggtgatactgcccaaagtaatatataatctcaatgctattcccatcaagctaccattgactttcttcacagagttagaaaaaactactttaaatttcatatggaaccaaaaaagagccggtatagcctagacaatcctaagcaaaaagaacaaagctggaggcatcacgctacctgacttcaaactatactacaaggctacagtaactaaaacaccatggtactggtacaaaaacaaatatatagaccaatggaacaggacagaggcctcagaaatgacatgacacatctacaaccatctggtctttgacaaaccagacaaaaacaagcaatggggaaaggattcgctatttaataaatgatgttgggaaaactagccatatgcagaaaactgaaactgtaccccttccttacaccttattacaaaaattaagtcaagatagattaaagacttaaacgtaagacctaagaccataaaaaccctagaagaaaacctaggcagtaccattcagggcataggcatgagcacagacttcatgattaaaacaccaaatgcaattgcaacaaaagccaaaattgacaaatgggatctaactaaagagcttctgcacaacaaaagaaactatcatcggagtgaacaggcagcctacagaatgggagaaaaattttgcaagctatccgtctgacaaagggctaatatccagactctacaaggaacttaaaaatttacaagaaaaaaacaaccccatcaaaaagtgggcaaaggatatgaacagacatttctcaaaagaagacatttatgcagccagcagacacatgaaaaaatgctcatcatcactggtcattagagaaatgcaaatcaaaactgcaatgagataccttctcacaccagttagaatggtgatcattaaaaagtctggaaacaacagatactgaagaggatgtggagaaatagaaatacttttacactgttgctgggagtgtaaattaattcaagcattgtggaagacagtgtggcaattcctcaaggatctagaactagaaataccatttgacccagcaatccattattgggtatatacccaaaggagtataaatcattctactataaagacacatgcacatgtatgtttattgcagcactattcacaatagcaaagacttggaaccaacccaaatgcccatcaatgatagactggataaagaaaatgtggcacatatacaccatggaatagtatgcggccataaaaaatgatgagttcacgtcctttgcagggacattgatagagctgtaaaccatcattttcagcaaaataacacaggagcagaaaaccaaacaccgcatgttttcttttaagtgggtgtaagttgaacaatgaagaacatatggacacagggaggggaacatcacacaccgatccctgtcgggggtttgggaggcaaggggaggggggatagcattaggagaaatacctaatgtagatgatgggttgatgggtgcagcaaaccaccatggcacatttgtacttatgtaacaaacatgcacgttctgtacattatcccagaacttaaagtataataataatttttaaaaaaaa

SEQ ID NO: 4181 - DNA, 321 bp, Homo sapiens
  source 1..321: mol_type = other DNA
acactgtgccttccctctagacactgtagatgatgtttagtcctagctcaatcagtctctccctttgcacatttccgttacaaccctgctcatgtgctcaagatattgctcctgctactctcccctctcttctgcatcaacagttctttctcatctactggacaattcgcatcagcctactatcatacacaaatacccccacctttaaaaacccctcccttggtcccacactagtcttcagattccatcccattttttgctccccttgacagcaaaaacctccaaagagtatctgtactcagtgtattttctcttcaccca

SEQ ID NO: 4182 - DNA, 307 bp, Homo sapiens
  source 1..307: mol_type = other DNA
gcggggcgtggtggctcatgcctgtaatcccagcactttgggaggctgaggcggacggatcatgaggtcaggagattgagaccatcctggctaacatggtgaaaccccgtctctactaaaaaataccaaaaaaaaaaaaaaaaaaatagctgggcgtggtggcaggcacctgtagtcccagctacttgggaggctgaggcaggagaatggtgtgaacctgggaggcggagcctgccgtgagccgagatctcgccactgcgctccaccctgggcgacagagtgagactcaaaaaaataaataaataaa

SEQ ID NO: 4183 - DNA, 270 bp, Homo sapiens
  source 1..270: mol_type = other DNA
gcactttgggaggccgaggctggcagatcatgaggtcaggagataaacaccatcctggctaacatggtgaaaccccgtttctactaaaaacacaaaaaattagctgggcatggttgcacgcacctgtagtcccagctactcaggaagctgaggcaggaaaatcgcttgaacctgggaggcagaagttgcagggagccaagatcgcaccactgtactccagcctgggcgacagagcgagactccacctcaaaaaaaaaaaaaagattaaaa

SEQ ID NO: 4184 - DNA, 34 bp, Homo sapiens
  source 1..34: mol_type = other DNA
tatggtgaagtagaaagagcactggattcagagt

SEQ ID NO: 4185 - DNA, 194 bp, Homo sapiens
  source 1..194: mol_type = other DNA
attattcttcatggcacatgtcactaacatatatatttgacttcattatttttattttatctgtctcccccagtccgaatgcaatccccttgaaggaatgggtttttcttttttttcattttggtttttgttggatgcatttagaatatgccagtacattggagatggacaacagatatttgttgaatgaatca

SEQ ID NO: 4186 - DNA, 2651 bp, Homo sapiens
  source 1..2651: mol_type = other DNA
cagttgacccttgaacaacacagatttgaactccatgggcccacttatacatctattttttttccatagatatattgaaaatttttttgaagatttgtgacagtttgaaaaaacagatgaaccacatggcctagaaatatcaaaaacattaagaaaaagttagatatgtcgtgaacgcataaaatatatgtagatagatactagtttataaatatgcacaaatctgttataaagagttaaaatttatcaaagtttacaaatatttatagaccatacatggcaccatttacagttgagagaaatgtaaagaaatgtaaagatgcattaaatcataatggcataaaattaactctagtaatactgtactactgtaataattttgtggccacctgttgctattgcagtgaactcaagtgttacaagtattgagcataaaatgtcatgtgacactaatcatctttgtgtgagtggttcatctctttagtaaattgtgtatcatagtaaaaattgatctcttggaattctcttgtatttttttatcatgtttagtgcaataccataaaccttgaatgacaccatgggacccatacaaagtgccactagtgatgctggaagtgctcctaagaagctgagaaaagtcatgacattacaagaaaaagttgaattgcctgatacataccatggattgaggtctgcggctgcgtttgccctccatttcaagataaacaaatccaatgtaaggaccattgtaaacaaagaaaagaatagtcatgaacccatcactgcagctactccagcaggcttgcactttttgcagaacatctttttatctcacattgaaaatgcagcttttatgtagatgcaggattgctgtagaaaggcatacttacatctaatatgattcaagaaaaatatgacaacttaaagcaaaaagaaagtgaaggatctaaagctggagaatttaatgccagcaaaggatggtttgataattttaggaagaggtttgcttaaaaaatgtcaagaaataggcgaagtagcttctgccaaccaagagacagcagacagttcccaggcgccattaagaaaaaatcattgaagagaaagtatatctgcctgaatgagtttttaatgcagacagaagtgccctattacggagaaaaaaaaaaaaaaaaggatgctcgaaggacatttattaggaagagaagcaagcagcaccaggatttaaggcaggaaaggataggctaactctactgttttgtacaaatgcagttgggttgaaaatcaggactgcccttatctataaagttgctaacttctgaggctttaagtgaaaagataaataccagctgcctgtcttttggttgtacagcaagaaggcctggacgatgagaaccctgtttctggattgtttccatcaatggctttgtctctggagtcaggcaatatcttgccagtaagggactgacttttaaagttattttgatattggacagtacccctggccacccagaataacatgagttcaacactgaaggtgtccaaggggccaacttgcccctaaacataacgcccctaattcagcctctagagtaggggatcataaggacctttaaggctcattacacatggtactctatgggaaggattgtcactgtggaagaaaaccctgatagaacatgaaaatctggaaagattacaccattgaagatgccattgttattgtggaaaacgccttgaaggccatcaagcccctaacagtaaattcctgctggaaaaaactgtccagatgttgtgcaagacttcacaggatttatggcagggccaatcaaggaaatcactaaagagattgtgcatatggcaaaaaaggtggggagtgtatgaaggctttcaagatatggatcttggattaattcaagagctaatagacaccacagcagagtaattaacagaagaggcttgatggagatgagtgcttctgaacagtaccagatgatgaggaagaagatgtaccaaaagcagtgccaggaaacaaattgacattagacagtatggcagaacggttctgattattcaagactcctttcaacttcttttacaacatggacccttctctgatacagacactgaaaataaagcaaacagtggaagacggattggtaccatacaaaaacgtttttagagaaatgaaagagcaaaaacatcagatagaaattacaatttccataaagttatccggagtgtgcctgccccttctgcctccccttctaccacctccacctcttctgcctctgtcaccccgagacagcgaagagcaacccctcctcttcctcctcagcctactcattattaagatgatgggattgaagacctttatgatgatccacttccacttaatgaataataaatatattttatcttccttaatgattcccttagtaacatttttttctctagcttgctttaccataagaatacaatatataatacatatacaaaatatgtgttaatcaactgtttatgttattgacgaggcttccagtcaacagtgggctattagtagttaagtttttggagagtcaaaagttatacatgggtttttgactgcactgggggttggcacccctaaccccctcatcattcaagggtcaact

SEQ ID NO: 4187 - DNA, 118 bp, Homo sapiens
  source 1..118: mol_type = other DNA
ccctggccgaggcacttggccttgctgagctggacttcctcctcctcctcctcatgaccggggtgaattagaacgtttttaaagacacccccttccaaattctgtaacacattgtaat

SEQ ID NO: 4188 - DNA, 576 bp, Homo sapiens
  source 1..576: mol_type = other DNA
tgtggcaggcagtctttgagatgtttccagtgacccgtcctctggtacaaacttacatcttcttcttgccataggtactggctaaacccaatgatgtgcttctaatgaatagaatatggcaaatgagatgggatgtcacttcagtgatttgaacccaaagaaagtctgagactcccatctctcgctttctcctccttggagcccttgcttgctcctggggaagccagctgtcatactgtaagctcccctatggaaagcccccagtagtaaggaactaatgtctcaggccaacagccagcaagaatcggaagccagccaacagccatacaagtgagcttggtgtggatcacctaaggcctgcaataccaggtgagtctggagggagatcttcccccactgaggtttgaggtgactacagccctggcaggtatcttgatcactgccttgtgacagatccagagcagagacacaaagaaaccacatccagattcctgacccacagaaactctaagacaataaatgtatgttgttagggggatgatgctaatgtgtcatacagcaatagctaactgatcc

SEQ ID NO: 4189 - DNA, 314 bp, Homo sapiens
  source 1..314: mol_type = other DNA
cagttgctccccacttgggggtctctggattcctaggaagtctgtgaatgtaataacagagatcagttcaattttcagtatttccaaaaggttaacgtgtatgtaaacatttagttattcacacacaagaaagcttcacatgtcaagtaaaatggcaactttctttactgttggctgcaattattttgattcagtatggtaacatcagacatctcatgtttatcacaatttctgattgacaattatgaatgccattaatttaaaaagaaaaatgaattaatcaatacttatcaggtagaaaaaaaatctttcaa

SEQ ID NO: 4190 - DNA, 136 bp, Homo sapiens
  source 1..136: mol_type = other DNA
catctgcacctgattcctctccatgtatactttgtgaacctgctagactgaattttccatcatccttgcaaactaccagacctttcttaaatctctgcctttgcacatgccattctgctaactggaatattctctc

SEQ ID NO: 4191 - DNA, 203 bp, Homo sapiens
  source 1..203: mol_type = other DNA
cagtgtggcacagagattaagaatacaggtcctgagtgatagactgcacaggttcaaatcctagcttcctcatttattggctctgtgaccttgggaagtctaccaaacatctctgggccaggttcctcctctgcaaactggggctgataatggcaaccacctcattgtaaggattaaatgaatgcctagtacataataagtgc

SEQ ID NO: 4192 - DNA, 303 bp, Homo sapiens
  source 1..303: mol_type = other DNA
gccaggcgtggtgacttgtgcctgtaatcccagcactttgggaggccaaggcagatggatcacctgaggtcaggagttcaagagcagcctggccaacatggtgaaaccctgtctctactaaaactacaaaacttagccgggtgtggtggcgggtgcctgtaatctcagctactcgggaagctgaggctagagaattgcttgaacccaggaggcagaggttgcattgagtagagattgtgccattgcactccagcctgggtgacagagcaagactctgtctccaaaaaaaaaaaaaaaaaaaaa

SEQ ID NO: 4193 - DNA, 311 bp, Homo sapiens
  source 1..311: mol_type = other DNA
gctgggcgtggtggctcacacctgtaatcccagcactttgggaggccgaggcgagtggattgccagagctcaggagtttgaaactagcctaggcaacacggtgaaaccccctctctactaaaatacaaaaaaaaaaaaaaaacaacaaattagctgggcgtggtggcatgcgcacgtagtcccagctacttaggaggctgaggcaggagaattgcttgaacctgggaggcagaggttgcagtgagccaagatcctgccactgcactccagcctggatcacagagcgagactccgtctccaaaaaaaaaaaa

SEQ ID NO: 4194 - DNA, 295 bp, Homo sapiens
  source 1..295: mol_type = other DNA
ccgggtgcagtggcttgcgcctgtaatcccaacactttgggaggccgaggcgggtagatcacctgaggtccggagttcgagaccagctcggccaacatggcgaaaccccatctctactaaaaatacaaaaaattagatgggcatggtgatggttgcctgtaatcccaggcactcaggaggctgaggcaggagaattgcttgaacctgggggaaagaggttgcagtgagctgagatcgtgccattgcactccagcctgggcaacaagagtaaaactccatctcaaaaaaaaaaaaa

SEQ ID NO: 4195 - DNA, 192 bp, Homo sapiens
  source 1..192: mol_type = other DNA
gatagtatatacagagggaagttcaacacacttgaaaatcaggaacctgggttctaattctccttcttccattcattagcttcttgaccttagacaagttattaacttgaacttcaggcctttttttctcaaaagaaacgattttgccaaaagaatccccgaactcccttcctgttttggaatttggtgatt

SEQ ID NO: 4196 - DNA, 432 bp, Homo sapiens
  source 1..432: mol_type = other DNA
cagccccttctcctccactcatctctgcacaccatgatctcgctccaggaccccctctcaggagcccggcattttcctgagggcttcttgctgcctctggctgccccgcctagacttgcatacaatccctgtttgctgctgcaaactccactccttttgtcaaggctcagctcaaatgtacctttcctgtgaagtcttcttgccttccccaggtgggcaggagccatgccttcttctaggacagactccacttgcactgtttgtctcttcctcatggagctttactgtgttgtcattgtccatggacctgcctcgccgccagcctgcaagctccatgagagctggggccagtttgattcagctccgtgtccccagtttgccatctctcctgtacttgctaggtgcccagtaaacatttgctgatagaatgaa

SEQ ID NO: 4197 - DNA, 611 bp, Homo sapiens
  source 1..611: mol_type = other DNA
tgtaaaatggttcagtcgctttgaaaaacaatttcacaggtcctcaaaagattgaacagagttactatatgacccagcaattctactcctaggcatatacccaaaagaactgaaaatatttgttcacataaaaacttgtgcatgaaggtttctagtcacattattcataatagtcaaacagtggaaacaagccaaatgttcattaattgatgaatgggtgaataaaatgtggtatagccacacaatggaatattattcaacagtaaaaagggatgaattactgacacatactacaacatggatggaccttaaaaacattatgtaagtgaaacaaacaaggtggccacaaaaggccacatataacagatcccatttttatgaaatatccaaagaggcaatccgtagagacagaaagtagattactcgttgccagacgctggtgaggaaggcaaaataaaggaatgcttacagataagggatttttctgaagggtaatgaaaatattctgaaattagatagtgttgatggttgcacaactttgtaaatatactaaaaaccactgaactgtgcactttgagagagtgaattttatggtatgtgaattagagctc

SEQ ID NO: 4198 - DNA, 296 bp, Homo sapiens
  source 1..296: mol_type = other DNA
gcctggtgcggtggctcacgcctgtaatctcagcactttgggaggctgaggcgggtggatcacgaggtcaggagttcaagacctgcctggccaagatggtgaaaccctgtgtctactaaaaaactacaaaaattagccaggcatggtggcaggcacctgtaatcccagctacttgggaggctgaggcaggagaatcgcttgaacctgggcagcaaaggttgcagtgaaccgaaatcgcgccactgcactccaggctgggcgacagagagagactccgtctcaagaaaaaaagaaaa

SEQ ID NO: 4199 - DNA, 219 bp, Homo sapiens
  source 1..219: mol_type = other DNA
gtaggggtgggagaacaggctttaatccgacagagatccaaaccatggttcagcaattacttgctaggcttaactctctggctctcagtttcttcctctacagaatgggaataataactttatagagttgttacgttaggagcaataaacaaactaatgtctccaaagcagttgcccagtgcctggcccataacaaaccttcagctgaaaaggagcttt

SEQ ID NO: 4200 - DNA, 226 bp, Homo sapiens
  source 1..226: mol_type = other DNA
cagtggtttacaactaaggctgactttgccacccaacctcccttcccaaccaccaccaggggacatttggcaatgtctggagactctttggttgtcatagttggaagatgtgctcctgacatatagtgggtaaaggccaaggatgctgctaaatagcctgcaatgcacagggcacaacaaagaatgatcaagcccggaagtcaatagggccaagattgagaaaacc

SEQ ID NO: 4201 - DNA, 2297 bp, Homo sapiens
  source 1..2297: mol_type = other DNA
aaagaaatagaaaatctgaatagacttataactagtaaggacatttaaccattaatcaaatatctcccaaaaaagaagagctctgggcttcatggcttcactggtgaattctgccaaacgttcaaagaactaacccaatccctctaaaagctttccaaaaaattgaagaggagggaacgctttttatctattctatgagaccagcattatcctgataccaaagccagcaaagacacaagaaaaccgtagaccaatatcccttataaacactgatgcagaaattctcaataaaatactagcaaatcaaatccagtagtatattaaaaggattatataccatgaccaagtaggatttattcctgcatggcaaagattattcaatatataaaaatcagttaatgcaatatattgcattaataggatgaagggaaaaaaacacatgatcatctcaattgatgcagaaaaagcatttgacaaaattgaacaccttttcatgataaaaaaaattctcaataaactaggaatagaaggaaactcccttaacataataaaagccatatatgaaaaatctacagtgaacatgcccaatggtgaaagactgaaagcttttgctttaagatcaggaacaaggcaaggatgcctgctttcatcgcttctattcaacatagtactggaagtctatccagagcaaagttgggcaagaaaaagaaataaaagacatccaaattggaaagcaagaagtaaaattatctctgtttgcagatgatatgttgttatatgtagaaaatcctaaagattccaccaaaaaaaaaactgttagaaataattcagcaaagtagcaggatacaaagtcaacacacaaaaatatggttgtatttctacacactaacaatgagcaatctgtaacgaaaattacagaaacaattccatttatgatagcatagaaaagaatgaaatacttagcagttaaccaagcaggtgaaagacttgcataatgaaaactataaaacatggctgaaataaattaaataagacataaataaatgcaaacacatcccatgttcatgggttagaagacattattgttaagatgtcaatactacccaaagcaatctacagattcagtgtaaaccctaccgaaatctcaatgacattttcttcagaaatagaaaaacccagaatcctaaaagaagaatcctaaaattcatatggaatctcaaggaactccttgagatagccacaacaatcttgaaaaagaagaataaatctaggggactcacacttcctatttcaaaactataataatcaaaacagtgtggtactggtataaagacagacatatagaccaatgggatagaataaaaagcaataaataaatagaataaaaagaaataaacccttgcatgtatggtcaaatgattttaacaagggtgccaagaccattcaatagggaaaaggtagtattttcaacaaatgatgctaggaacactggatatccccacatagaagaatgaagttggaccccttctaatatcatgtacaaaaattaactcaaaatgaatcgaagacctaaatgtaggacctgaaactgtaaaactcttaggagaaaacacagggcaaaaccttcatgacactgggtttgacaatgatttcttggatatgacactaaaggcataggcaacagaagaaaaaataagcaaactggatttcatgaaaatctttaaaatttgcatatcaaagacaatataaaaaagaaaaggcaacccacagaatgggaggaggtattttcatatcgtgtatctgataagagattaatatccatgatatatacagaacttataaaactcaacaagaaaacaaataacctaatttaaaaatgagcaatggacttgaatagacatttctctaaagaagataaacaaatggccaatgagcataggaaaagttgctcagcatcactaatcattagagaaataaaaatcaaaattacaatgagataccacctcatacacatcaagacggctgctatcaaaacaaaacaaaataacaagtggtggcaaagatgtggagaaaatggaacccttatgcactgttggtgagaatgtgaaatggtacagctgctgtggaaaacagtatggcagttcctcaaaatataaaaaacagaattaccatatgatctggcacttccacttctgcgtatatacccaaaagaacctaaagcagagcctggaagagatatttgtacacccatgttcatagcagcattatttacaatagctaaaatgtagaagcaactt

SEQ ID NO: 4202 - DNA, 276 bp, Homo sapiens
  source 1..276: mol_type = other DNA
gccaggcatggtggctcatgcctgtaatcccagcactttgggaggctgaggcgggcggatcacctgaggttgggagttcgagaccagcctgaccaacacggagaaaccctatctctactaaaaatacaaaagtagccgggcgtggtgatgcgtgcctgtaatcccagctacccaggaaggctgaggcggcagaatcacttgaacccggaggcggaggttgcggtaagccgagatcacctccagcctggacactctgtctcgaaaaaaagaaaagaa

SEQ ID NO: 4203 - DNA, 411 bp, Homo sapiens
  source 1..411: mol_type = other DNA
gtttttactgggggtctgaagacacaagttttattggaggtctaaatgaactcctcaaacctccgtgatttagcaggagatgtgataagggtaatcaccccagcacttggacccatctagattcaatacatttactgaggctccagaagaaggtcttcacaccttagttatggattagaagaagttaatcacttacgtctttagatgaatgcacacttacatgtagacatatggcttagaaggtatataaaccctggaaagctttgtaattttgagttagtctggtgatatattccaggccttctccctgtacccggttacaaaaataaacttccttccttcccagttcaactgcatcttgttattgggccgcgagaatcagcagcctgaccctcggcttggaccaggaac

SEQ ID NO: 4204 - DNA, 676 bp, Homo sapiens
  source 1..676: mol_type = other DNA
gttaaggccttttttatttctctccttcaactttttgagcaaaagtttttttcttctccgtcaaccaaattctgttttcttcattttacttctgctgcctcttctttctcttgctaccctgtgctgcatgaggaatctaaaatagtttctaacaccctgggattccttaaagaaaacagagaaggcactagactcccttttggggagcaacctctgtttctccttatggaactcaaagagtgtaaaagagaaaatttcgtctcagatcttacactgcttccttttgtatagtgttacctggtttctttctttcttcttttttttttttttttaactaaaataattattttagtcaaagagtaacaacagaggttactgttgggtgtttaaagttaggaagagagtagttcagacacttagagaaacatttttgttaaaaaaaaaaaaaaaaggagagtgcactcataaaaccatcacatggtcttagcctcataataattctctttttggagacccggaattcagtgtgggctctgcccagagctcagagatccagttaaaaggcagactaaatttagaactacttatataaataaagtcagtcttctaatataatcctatgatagatttctataattttatgtttgatttggcattcgtttttaatctcctccta

SEQ ID NO: 4205 - DNA, 850 bp, Homo sapiens
  source 1..850: mol_type = other DNA
gagaggtgaaaccagctggacttcctgggtcgagtggggacttggggaacttttctgtctagctagaggattataaacacaccaatcagtgctctgtgtctagctaaaggattgtaaatataccaatcagcactctgtaaaaacgcaccaatcagcgctctgtgtctagctaaaggattgtaaatgcaccaagcagcactctataacaatgcaccaatcagtgctctgtgtctagctaaaggattgtaaatgcaccaagcagcactctataacaatgcaccaatcagtgctctgtgtctagctaaaggattgtaaatgcaccaatcagcactctgtggctaaaggattgtaaatgcaccaatcagcactctgtaaaaatgcaccaatcagcactctgtgtctagctaaaggattgtaaatgcgccaatcagcactctgtaaaatgcaccaatcagcactctgtgaaatggaccaatcagtgctctgtaaaatggaccaatcaccaggacgtgggtggggacgaataagggaataaaagctggtcaccacagccagcagcatcaacccgctcaggtccctttccatgctgtggaagctttgttctttcgctcttcataataaatcttgctgctgctcactctttgggtccacactacctttaattgctgtaacactcaccatgagggtctgcagcttcattcctgaagtgagaccacaaacccaccagaaggaacaaacaaccctggacacgccacctttaagagctgtaacactcactgcaaggtccgaggcttctttcttgaagtcagagagaccaagaacccaccagaaggaataaattctggaaaca

SEQ ID NO: 4206 - DNA, 303 bp, Homo sapiens
  source 1..303: mol_type = other DNA
gccgggcacggtggctcatggctgtaatcacagcacttcgggaagccaagacgggcagatcactgaagtcaggatttcaagaccagcctggccaacaccctgtctctattaaaaaatataaaaaaattacctgtgcatggtggtgtgtgccagtaatcccagctactcaggaggcagaggcaagaaaatcgcttgaacccaggaggtggaggttgcagcgagctgagattgcgccactgtacgccagcctggcagcctgcgtgacagagcgggactccgtctcaaaaaaaaaaaaaaagagaa

SEQ ID NO: 4207 - DNA, 44 bp, Homo sapiens
  source 1..44: mol_type = other DNA
tgggcctcagtttctttatctgttaaatgagctagaagttcctg

SEQ ID NO: 4208 - DNA, 129 bp, Homo sapiens
  source 1..129: mol_type = other DNA
gctgcttggaaggagccatggcctagggttcagggaactagactctatcccagttgggttcagactgctgtgactgtggacacgatgctccttgttctgggctccagttttcccatttgtgagatgagg

SEQ ID NO: 4209 - DNA, 72 bp, Homo sapiens
  source 1..72: mol_type = other DNA
ttttctcatcagcccaatggggaggtttgacctatagatctccaagtttcctcccagctttagtattttgtg

SEQ ID NO: 4210 - DNA, 231 bp, Homo sapiens
  source 1..231: mol_type = other DNA
gcaggagaagcaatggagtcagtgtggtgtggggagacctactttttaacctgggcttagccacctgctctgtgatccagggcttaccttctttgggcctcggcctcctaatctgggtaatggggaggacttcattggcattgttagtcccacaggccaaggataaggttgaaatgagacggcttgtgtgtgaaaagattttggaaattacacagatgtgggcttgttatt

SEQ ID NO: 4211 - DNA, 3592 bp, Homo sapiens
  source 1..3592: mol_type = other DNA
ttggtgccatgactcggactgggggacctcccttaggagatcaatccctatcctcctgctctttgctccatgagaaagatcgacctacgacctcaggtcctcagactgaccagcccaaggaacatttcaccaattttaaatcgggtaagcggcctctctttactctcttctccaacctctctcactatccctcaacctctttctcctttcaatcttggcaccacacttaaatctctcccttctcttaatttcagttcctttccttttctggtagagacaaaggtgaagcgttttatctgtgaacccaaaactccggcgccggtcacagaatcaggaagagtcttcccttggtgtttaaccacatggggatgcctacatgattattcacccatgtttcagaggtgtctgaccacggagggatgcctgtcttggtccttcacccttagcggcaagtaccactttttggggggcaagaaccccccgaccccttccctccatgtctctacctcttctccactttcctgggggcaagcatccccccaccccttctctctgtgtctctaccctctattttctctggacttgcctccttcactataggtaaacttccaccctccattctccttctcccttagcctgtgttctcaaagacttaatacctcttcaactcacatgtgacctaaaacctaaatgccttattttcttctgcaatgccacttgaccccaatacaaactcgacagtggttccaaatagccagaaaatggcactttcgatttttccatcctacaagatctaaataatccttgtcgtaaaatgggcaaacagtctgagatgcctgacgtccaggcattcttttacacatcggtccctccctagtctctgttcccaatgcaacttgtcccaaatcttccttctttccctcccacctgtcccctcagtcccaaccccaagcgtcgctgagtctttcttctttccaatcttccttttctatagacccatctgacctctcccctcctccccaggctgctcctcgccaggctgagctaggtcccaattcttcctcagcctccgctcccctaccctataatccttttatcacctcccctcctcacacccggtcgggcttacagtttccttctgcaacaagccctcccgcacctgcccagcaatttcctcttaaaaaggtggctggagctaaaggcatagtcaaagttaatgctccttcttctttatcccaaatcagagagcgttaggctctttttcaccaaataaaaaacccagcccagttcatggctgcttggcagcaaccctgagacgctttacagccctagaccctaaaaggtcaaaaggctgtcttattctcaatatacattttattacccaatttgctcccgacattaaataaaactccaaaaattaaattccagctctcaaaccccataacaggacttaactaacctcgccttcaaggtgtacaataataaagtggaggcagccaagtagcaatgtatttctgagttgcaattccttgcctccactgtgagacaaatcccagccatatctccagcacacaagaacttccaaatgcctggaccacagctgccaggggttcctccagaatctcctccccaagccctggaaatctggccactgggccaaggaatgcccatggcccaggattcttcctaagctgtgtcccatctgttcaggaccccactgaaaatcggactgttcaactcccctggcagccacttccagagcccctggaactctggcccaaggctctctgacaccttcccagaccttcttggcttagcagctgaagactgacactgcccgatcgcctcagaagcctataggaccttcacagatgctctgggtaaccctcacagtggagggtaagtctgtccccttcttaatcaatacagaggctacccactgcacattacctttttttcaagggcctatttcccttacctccataactgttgtgggtattgacagccaggcttctaaacctcttaaaattccccaactctggtgccaacttagacaatatgcttttaagcactcctttttagttatccccacctgcccagttcccttgttaggccaagacactttaactaaattatcttcttccctgactattcctgggctacagccacacctcattgctgccttttcccccagttcaaagcctccttcacatcctccccttatatctccccaccttaacccacaagtataggacacctctactccctccttagcgaccgatcatgcaccccttaccatcccattaaaacctaatcacccttaccccgctcaatgccaatatcccatcccacagcatgctttaaaaggattaaagtctgttatcactcacctgctacagcatggccttttaaagcctataaactccccttacgattcccccattttacctgtcctaaaaccagacaaggcttacaggttagttcaggatctgcaccttatcaaccaaattgttttgcctatccacaccgtggtgcccaacacatatactctctgcctcaatacctccctccacaacccattattctgttctggatctcaaacatgctttctttactattcgtttgcacccttcatcccagcctctcttcgctttcacttggactgaccctgacacccatcaggttcagcaaattacctgggctatactgccacaaggcctcacagacagcccctattacttcagtcaagcccaaatttcttcctcatcagttacctatcttggcttctcataaaaacacatgtgccctccctgccgatcatgtccacctgatctcttaaaacccagcactttctacaaaacaacaattcctttccttcctaggcatggttggatactttcaactttagatgcctggttttgccattctaaaaccattttataaactcacaaaaggaaacctagctgaccccatagatcctaaatcctttccccactcctttccgttccttgaagacagctttagagactgcccccactctagctctccctgactcatcccaacccttttcattacacactgctgaagtgcagggctgtgcagtcagaattcttacacaaggaccaggatggcatcctgtagcctttttgtccaaacaacttgaccttattgttttaagctggccattatgtctccatgcagtggctgctgccgctctaatacttttaaaggcccttaaaatcacaaactatgctcaactcactctctacagctctcataatttccaaaatctattttcttcctcacacctgacgcatatactttctgctccctggctccttcagctgtactcactctttgctgtgtctcccacaattaccattgttcctggcccggacttcaatccagcctcccacattattcctgataccacacctgaccctcatgactgcatctctctgatccacctgacgttcaccccatttccccacatttccttcttccctgtttctcaccctgatcacacttggtttattgatggcagttccaccaggcctaattgccacacaccagcaaaggcaggctatgctgt

SEQ ID NO: 4212 - DNA, 82 bp, Homo sapiens
  source 1..82: mol_type = other DNA
ttgcagtgagccgagatcgcatcactgcactccagcctgggcgacacagcgagactccgtcccaaaaaaaaaaaaaaaaaaa

SEQ ID NO: 4213 - DNA, 277 bp, Homo sapiens
  source 1..277: mol_type = other DNA
gccaggcgcaatggctcacaccagtaaatcccagcactttgggaggccgaggcgggcagatcaccaggtcaggagatcgagaccatcctggctaacacggtgaaaccccatctctactaaaaatacaaaaattagcccagcgtgggctactcaggaagctgaggcaggagaatggcgtgaacccgggaggcggagcttgcagtgagccaagatcgcgccaccgcactccagcctgggcgacacagcgagactccgtctcttaaaaaaaaaaaaaaaa

SEQ ID NO: 4214 - DNA, 285 bp, Homo sapiens
  source 1..285: mol_type = other DNA
gccgtctgcggtagctcacgcctgtaatcccagcactttggaaggccgaggtgaggggatcacgaggtcaggagctcgagaccagcctgaccaacatggtgaaccctcatctctactaaaaatacaaaaattagccaggcctggtggggcgcgcctgtaatcccagctactcaggaggctgaagcaggagaatcacttgaaccctgaaggcggaggttgcagtgagccgagatcgtgacactgcacaccagcctgagtgacaagagactctgtctcaaaaaaaaa

SEQ ID NO: 4215 - DNA, 295 bp, Homo sapiens
  source 1..295: mol_type = other DNA
ggccaggagcggtggctcacgcctgtaatcccagcactttgagaggccgcggtggacagatcacgaggtcagtagttcgagaccagcctgagcaacatgttgaaaccccgtctctactaaaaacaaaaaaaattatccgggcgtgatagtgcgcacctgtaatcccagctactcaagaggctgaggcaggagaatcgcttgaaccgggaggcagaggttgcagtgagcagagatcaagccactgcactccagcctgggtgacagagaaagaccgcatctcaaaaaaaaaaaaaaa

SEQ ID NO: 4216 - DNA, 326 bp, Homo sapiens
  source 1..326: mol_type = other DNA
ggctgggcatggtgagtcacgcctgtaatcccaacactttgggaggccaaggtgggcggatcacgaggtcgagattgagaccatcctggccaacacagtgaaaccccgtctctactaaaaatacaaaaattagccgggcgtggtggtgcacacctgtagtcccagctactcaggaggctgagacaggagaatcgcttgaatacgggaggcggaggctgcagtgagccgagacagtgctgcagtgagccgagatggcaccactgcactccagcctggcgacaaagggagactctgcctccagaaaaaaaaaaaaaaaaaaaaaggaa

SEQ ID NO: 4217 - DNA, 305 bp, Homo sapiens
  source 1..305: mol_type = other DNA
gctgggtgcagtggctcatgcctgtaatcccagcactttgggaggctgaggtgggcagatcacatgagatcaggagttcaagaccagcctggccaacatggtgaaccctcatctctattaaaaatacaaaaattagctgagtgtggtggcacatgcctctaatcccagctgctcggaaggctgaggcaggagaatcgcttgaacccgggaggcggaggttgcagtgagccgagatcgtgccactgcactccagcctgggcgacagagcgagatctgtctcaaaaaaaaaaaaaaaaaaaaaaaaa

SEQ ID NO: 4218 - DNA, 299 bp, Homo sapiens
  source 1..299: mol_type = other DNA
ggccgggcgccatggctcacgtctgtaatcccagcactttgggaggccgaggcgggtgggttacttgaggtcaggagttcgagaccagcctggcaaacatggcgaaaccccatcttaactaaaaatacaaaaaaattagccgggtgtggtgtcacgcgcctgtaatcccagctacttggggggctcaggcaggagaattgcctgaacccaggaggcggaggttgcagtgagctgagattgggccactgcactccaccctgggcgacagagtgagactcggtctcagaaaaaaaaaaaaa

SEQ ID NO: 4219 - DNA, 752 bp, Homo sapiens
  source 1..752: mol_type = other DNA
gagagacaggactagttggatttcctaggctggctaagaatccctaagcctagctgggaaattgaccacgtccacctttaaacacggggcttgcaatttagctcacacccgaccaatcaggtagtaaagagagctcactaaaatgctaattagggaaaaacaggaggtaaagaagtagccaatcatctatcgcctgagagcacaacaggagggacaatgatcaggatataaacccaggcattcaagccagcggtggctaccctctttgggtcccctccctttgtatggaagctctgttttcactctattaaatcttgcaattgcacacttttctggtacgtgtgtgtcacagctcaagctgagctttcgctcaccgtccaccactgctgtctgccgctgtcacagacccacagctgacttccatccctctggatccagcgaggcgcccattgctgctcctgatcgggctaaaggcttgcccttgttcctgcagggctaagtgcccaggttcgtcctaatctagctaaacactagtcactgggttccacgattctcttccatgacccacagcttctaatagagctataacactcgccgcttggcccaagattccattccttggaatccatgaggccaagaaccccaggtcagagaacacaagacttgccaccatctcggaagtggcccgtcaccatcttggaagcgacctgccaccatcttgggaacttggggagcaaggacccccagtaaca

SEQ ID NO: 4220 - DNA, 306 bp, Homo sapiens
  source 1..306: mol_type = other DNA
gctgggcgcagtggcttgcctctaatcccagcacttcaggaggccgaggcaggcagattgcttgagctcaggactttaagaccagactgggcaacacggagaaaccccgtctctacaaaaaaattcaaaaataagccgggcgtggtggtgcacgcctgtgttcccagctactctgaaggctgaggtgggaggattgcttgaacccagaaggtagaggttgcagtgagctgagaccataccatgcactccagcctgggtgatagagtgagactctgtctcaagaaagaataaaaagtaaaaataaaa

SEQ ID NO: 4221 - DNA, 148 bp, Homo sapiens
  source 1..148: mol_type = other DNA
gagtagggctcagtgggagcaatgccaaccctggtgcagcaataaagggggcattctctgcagggaatttaagaattaataataaaattgaccaaaatcactctgctttttattatcactaattctgaataatgtcaacaataaatac

SEQ ID NO: 4222 - DNA, 347 bp, Homo sapiens
  source 1..347: mol_type = other DNA
gtactgtcactcctttggtcattaaatgcactgggcttgcccgcactttggccttcctagaacactgcttcataacctctctgtctgacttctgcatctccttccaggtcagctcattcacaagagttgctcccaagcctggatgagttgcaccttgcatcttgagcatgcatttctcacaataattattaagctgtgtgataatttctgctttcaggacactcatccattatcttggctgtgagctccttgggtacgggtaccttgtatgtttacttttatatccctagcacaaagcaagtgcctggcacatagtcagtgccctaagtattcgtagagtgaagaat

SEQ ID NO: 4223 - DNA, 96 bp, Homo sapiens
  source 1..96: mol_type = other DNA
ctgtacgcccccatgtaagtcatctgacccaggagactcagttttccaacctgtcaaataggggaacgagaaacccagcctaccttaacgggtggt

SEQ ID NO: 4224 - DNA, 48 bp, Homo sapiens
  source 1..48: mol_type = other DNA
aagagtatctggccatggcggacactcagcatttgttgattgaataaa

SEQ ID NO: 4225 - DNA, 830 bp, Homo sapiens
  source 1..830: mol_type = other DNA
aaagtaaggtaattgatgtgggcatatttgaaaatataataattcatgagtccaatatagtactcacaagatagaatcttcctcctaaaaggttcatttgatgttattggaggtgaccataacatgaatccctcattctgaaatcattaactggagagaaagaatcaaggatacatattgcccttccagaaggggagccaaatggccccagttcctaagggaaacctcttctttatggaagaatgataactgataagtgtaaaggaaatgatagaattggggaaatcaccattttgtcacttgaatggaatatttcattagggttataatcatcaacgcatgctaaaatcttaggcaaaagggcaatgggtaactgaacattcacagtggcgccaaagcatgacttcacagtttacttactagtcatgagggcaaaaactaacttcacaatggagagttctggctgttaccaccttattcaaggaacaatacttaacatcactaacagtggaaaaaccagatattatgtgccccctcgtgtaacgaaaatgaggaacacagtatcaaccacaaagtattcttgcccaaaatgtttaaccagaattgaatccagcctttagatatccttttcagtttacaggaaatcaaactgaccactggaaaataatcagagaaatcaagaatatagaatattctgtaagacaactgtcctggtgtcttcaaaaaactcagtcataaaagggtaaggtaataccatagattgcaacagaattaaggaacgttaaacccaaatgcaatatctggtgtttcaccggattctggtagacaaa

SEQ ID NO: 4226 - DNA, 203 bp, Homo sapiens
  source 1..203: mol_type = other DNA
aagaacatgaggtcaaaaatcagagctcgaaaatctactgcttcatagctgtgtgaccacaggcaaattctttttgcctcagttttttcatcctaataatgaagaatatcttatttgctttggagggctataagacatgatgagatataataaacataaggcactgagatacatcatagacacttaattgttgttagctatta

SEQ ID NO: 4227 - DNA, 163 bp, Homo sapiens
  source 1..163: mol_type = other DNA
aagaaggcagagctgaatgctggagaaaaactgagtactagcaacagtttttgaaccctgaatactgtcataactgaagctagaattatccctggacttgtttgccactaaaatttccttgttttgcttaccctggtttcagctggcaccctgatcacttgaa

SEQ ID NO: 4228 - DNA, 108 bp, Homo sapiens
  source 1..108: mol_type = other DNA
tagtggacctttattgtctcctgagcacccattctttgttctttcagaaacacaactggttttgagaatccatcccttcttcactcagtccacgtaaaggttaggatg

SEQ ID NO: 4229 - DNA, 1231 bp, Homo sapiens
  source 1..1231: mol_type = other DNA
acaacagcatcaaaaaccatgaaatacacagggatacagttaaaggatatataggatctctgcactgaaaaatgtaaaacactgctgagaaaaaatgaagtaaatggaaaaacatgtttatggattggatgactacttgacttatagattcagtgaatcctaataaaaatccacaaggcttcttctgggagtagtttggtggaaattgacaaaatttatttggaaatgcaaaggacctagaataaacaaagcagtttgcagaagaagaaattagaacgtctgttttacctgagatcaagacttaccaagttttgacaaaaagataaacagaatggaacaaaactagagccacagatatatggtcaaatgattttagaccgggcaccaaaacagtttaacagtgaaaggagactctttgacaagtggtgctggaaccactgaacgttcagtagaatgttcaaaggtatttgatgcctacctactttatggcatataaaaatactaattcaaggtgaatcacagacctgaatattcgctacaactatcatactcctaagaaaaataagagtatcttcatgagcttgggtaggcaaagacttcttaaagagcacaaagaaagcattaactataaaacaaaaattcataaattggatttcaccaaaactaaacccttcttctcatcaacagatactactgagaacaggcaagctatagagtgggaaaagatatgtgacacataaatctgacaatcctttatgtccagaatgcacaaaggagtcctatccaattaaaaggaaaaaaggacatgaaaagtactgtccattagtcatcagggaaatgcaaactaaaccaccatgagataccgccacatatccagaagcatggctaaaatgcaacaggtggacaataccaattgtcggcaaggatgtaaaaaacaaccagagtacaatgtgctggcaggaacacaaaacagcacaatggttttagaaaactgttgggcagtttcttaaaaagttaaatatacagctaccataagacctagcaattctactcctagctttttaatccaagagaaatgaaaacatgtccacaaaaatccctgtacaagaatatttatagcacatttataatagccccacagaaacagctcaggggtccatgaacagaaggatagctacataaactgtcatgcattcaaatagcacgacacaacaataaaaaggaacaaacc

SEQ ID NO: 4230 - DNA, 236 bp, Homo sapiens
  source 1..236: mol_type = other DNA
gaaggcttccctgacccctgcccaggaagagttcactggtcgctctgttgtgccccacagcactttgttatacctctgccacacacttcacgcagcgcgttgtaactcatgtgtttacatgtctgtccccccagactgtgagctccttgagggcagggactgtacattctccagctctgtgtccccagggcctggcacattgtagacgcttaataaatgtctgttaaatgaatgag

SEQ ID NO: 4231 - DNA, 308 bp, Homo sapiens
  source 1..308: mol_type = other DNA
gctgggcacgggggctcacgcctgtaatcccagcactttgggaggccaatgtgggcgggtcacttgaggccaggagttcaagaacagcctggccaacatggtgaaacaccgtctccactaaaaatacaaaaattagcccagcatggtggcacatgcctgtaattccggctacttgggaggctgaggcaggagaattgcttgaacctgggaggcagaggttgcagtgagccaagatcgcaccactgcactccagcctgggagacagagcaaggctctgtgttaaaaaaaaaaaaaaaaaaaaaaaaaaa

SEQ ID NO: 4232 - DNA, 288 bp, Homo sapiens
  source 1..288: mol_type = other DNA
ccagacttgatggctcacgcctgtaatcccagcacttcgggaggccgagtcaggcagatcacaaggtcaagagatggaggccatcctggccaacatggtgaaaccccatctctactaaaaatacaaaaatgagctgggcatggcggcgtgtgcctgtagtcccagctactcaggaggctgaagcaggaaaatcgcttgaacccgtgttgcagtgagccaagatcgcgccagcctggcgacagagtgagactccgtctcaaaaaaaaaaaaaaaaaaaaaaaaagtaaa

SEQ ID NO: 4233 - DNA, 339 bp, Homo sapiens; identical to SEQ ID NO: 3854
  source 1..339: mol_type = other DNA

SEQ ID NO: 4234 - DNA, 220 bp, Homo sapiens
  source 1..220: mol_type = other DNA
gaccgggcatggtggctatgcctataatcccagcattttgggatgccaaggcgggtggatcacctgaggtcaggagttcaagaccagcctggccaacatggcgaaaccccgtctctaatacaaatacaaaaattacccaagcatggtggccactgtactccagcctgggcgacagagcaagactccgtctcaaaaaaaaaaaaaaaagaaaaaaagagaa

SEQ ID NO: 4235 - DNA, 302 bp, Homo sapiens
  source 1..302: mol_type = other DNA
cagccaggagcctccccacagggacttcagcacagacggccgggaaaatctgcattaacctgagctctggacctaagagaggacaaggccttgaccatttctacagactcacaagatgcaatctctgtggtccatgcccgtggtgtgatctgggaaacagggggccttctaaatgccaacaacaaggaaatcaaatgtgcaacaaacagaaatagcggcattgacgtgggccatggagaggcctaaacagatgactgcagtccactgctaaggtcatcaaaggggtgactctgaaataataa

SEQ ID NO: 4236 - DNA, 294 bp, Homo sapiens
  source 1..294: mol_type = other DNA
ggctgggcgcagtggcttgtgcctgtaatcccaacattttgggaaaccaattcaggtggatcattagaggtcaggggttcaagaccatcctggccaacatggtgacatcccatctctactaaaaatacaataagttagctgggtttggtgttgggtgcctgtaatcccagctactcgagaggctgaggcaggataatcgcttgaacctgggaggaggaggtggcagtgagctgagatcgtgccattgcactccagcgtgggcaacaagagtgaaacgtcgtctcaaaaaaaaaa

SEQ ID NO: 4237 - DNA, 123 bp, Homo sapiens
  source 1..123: mol_type = other DNA
ggaagactggtaaatggacgtcaacgtgatgcctatggctcctggtggatttagatacctcctggtgcttattgatatctttaccagttgcacgggggcttttccatgccagactgaaaacgc

SEQ ID NO: 4238 - DNA, 145 bp, Homo sapiens
  source 1..145: mol_type = other DNA
atcaaggatcaaccttcaactatttactagcagaacactgaggggactgtgcggtcaccaatacctcctattgcacttggataaacacctcccaggaaatagagatgaacagaaaggacatagtcaaacaagcagaatggctgca

SEQ ID NO: 4239 - DNA, 383 bp, Homo sapiens
  source 1..383: mol_type = other DNA
tgacatggttcagctctgtatccacacccaaatctcatgtcaaattgtaattcccagtgttgtgggagggacctggtgggaggtgattggctcatgggggccgacttcccccttgctgttctcgtgatattgagtgagcgcttgtgggatctggttgtttaaaagcttgcagccctcccacttcactctctctgtctctcctgctccaacatggccagacgtgcctgcttccccttcgccttctgccgtgattgtcagtttcctgaggcctccccagccacgctttctgtacagcctgcagaactgtgagtcaattaaacctcttttcttcataaattacccagtttctcataattctttatagcagtgtgaaaacagactaa

SEQ ID NO: 4240 - DNA, 264 bp, Homo sapiens
  source 1..264: mol_type = other DNA
aggctgaggcaggtggatcaactgaggtcaggagtctaagaccagcctggccaacatggtaaaaccccatctctactaaaaatacaaaaattagctgagcgtggtggcgggcacctgtaatcccagctactcaggagactgaggcaggagaatcatttgaacccgggaggcagatgttgccagtgagctgagatcacgccattgcactccagcctgggcgacaagagcaaaactcaaaaaaaaaaaaaaaaaaaaaaaaggaaa

SEQ ID NO: 4241 - DNA, 242 bp, Homo sapiens
  source 1..242: mol_type = other DNA
agcgaaatgtggcacatgcatacaatggaatattagccttaagaaattctgacacatgctataacatggatgaactgtgagaacattatactcagtgaaataagccagtcacaaaaggacaaatactgaatgattccacttatatgagatagggtagtcaggatcatagagacagaaagtagaatggtgggtgtcaggacaaaaggaaacgggaagttattgtttataataagtacagattt

SEQ ID NO: 4242 - DNA, 294 bp, Homo sapiens
  source 1..294: mol_type = other DNA
ctgggtgcagtggctcacgcctgtaatcccaacactttgggaggctgcggcagtggattgcctgaggccaggagttcaagaccagcctggccaacatggtgaaacccagtctctactaaaaacacaaaaatgagccacgcatggtggcacttgcctgtaatcccagctacttgggaggctgaggcaggagaatcgcttgaacctgggaggcggagggtgcagtgagccgagatggcgccactgcgctccagcctgggcaacagagcgagactccatctcaaaaacaaaacaaaa

SEQ ID NO: 4243 - DNA, 302 bp, Homo sapiens
  source 1..302: mol_type = other DNA
gcagggcgcggtagctcacacctgtaatcccagcactttgggaggctgaggcgggcggatcacttgatgtcgggagttcgagaccagcctgaccaacgtggagaaacccccgtctctactaaaagtacaaaattagccaggcatggtggcgcatgcctgtaatcccagctactcaggaggctgaggcaggagaatcgcttgaacctggggaggcggaggttgcagtgagccaagatcatggcattgcactccagcatgggcaacaagagtgaaactccgtctcaaaaacaacaaacaaacaa

SEQ ID NO: 4244 - DNA, 244 bp, Homo sapiens
  source 1..244: mol_type = other DNA
gccaggcgggcggatcacgaagtcaggagattgagaccgtcctggccaacatggtgaaaccccacctctattaaaaatacaaaaattagctgggcgtggtggcgcttgcctgtaatctcagctactctagaggctgaggcaggagaatcgcttgaaccccggaggcggaggctgcagtgagccgagatcgtgccactgcactccagcctggtgacagtgagactcttgtctcaaaaaaaaaaaa

SEQ ID NO: 4245 - DNA, 246 bp, Homo sapiens
  source 1..246: mol_type = other DNA
tgggcatggtggctcactgtctgtaatgtattacctgaggcagaagaccacctgagggtaggagtcaagatcagcctgggcaacatagtgagacgctgtctctacaaaaaataattagcctggcctggtggtgcatgcctagtcctagctgatctggaggctgacgtgggaggattgcttgagcctagagtgagctattatcatgccactgtacagcctgggtgttcacagatcttgtgtctcaaa

SEQ ID NO: 4246 - DNA, 249 bp, Homo sapiens
  source 1..249: mol_type = other DNA
gggtgcggtggctcacatctgtaatctcagcagtttgggaggccaaggcaggcgcatcagctgaggtcaagagtttgagaccagcctggtcaaaatgatgaaaccccatctatactaaaaatacaaaaattagctgggcatggtggcacacgcccattatcccagctactcaggaggctgaggcactagaatcacttgaacccaggaggcggaggctgcagtgagctgagatcacgccactgcattcca

SEQ ID NO: 4247 - DNA, 133 bp, Homo sapiens
  source 1..133: mol_type = other DNA
gaaatgcagagtatatttaattggcatgattttttcatggatgtgtgcttcatttgatctattgtatgtagctcgtgatcacattttctgttggttaacattgttcctagcttatatgatggaattaaatata

SEQ ID NO: 4248 - DNA, 200 bp, Homo sapiens
  source 1..200: mol_type = other DNA
gttctggagtcctatctacctgggttcagatctttgttggccagtccctggctgtgtgacttcactgctttaagcctctgtcttcatccttaaagtggtgatgatagtacctacctcactctgatctctgaatgagaacacatgtaagacacttagcacagttcctggtgctcaaagagttccaacacctgaaagcacca

SEQ ID NO: 4249 - DNA, 444 bp, Homo sapiens
  source 1..444: mol_type = other DNA
gtgataggcagaattttggtccccatcaccttccctgcccagtgttatgcctatgaatgtgttacattatgtggtaaaagggactttgcagatgtaactaaaatttctaaaatagagatattatcctggattacctgggggaacccagtgtaattacatgaacccttaaaaatggaagaggatgcaggagtcagattcaaaggaaggcccaaggtgctattgctgacttgaagatagaggggccatgtggaaatcaagagaaggaagtgaatccttccagtgagcttggaagaaagcaccttgaggcacagatgagaagcttggccttacctgatgccttgattttagcctggtgagaccctgagcatataaatttgctgtgctatgccacacttctcacctacagaaacttagtttaaagccactaagtttgtggtaatttgt

SEQ ID NO: 4250 - DNA, 301 bp, Homo sapiens
  source 1..301: mol_type = other DNA
gctgggcctggtggttcctgccagtaatcccagcactttggaaggcttagacgggcggatcgcctgaggtcaggagtttgagaccagtctggccaacatggtgaaaccccacgtctactaaaaatacaaaaattagctgggcatggtggcgtgcgcctgtaatcccagctacttgggaggctgaggcaggagaatcgctggaacccgggagggagggttgcagtgagccaagatcgtgccatcgcactccagtctgggtgacaagaatgagactctattaaaggaaaaaaaaaaaaaaaaa

SEQ ID NO: 4251 - DNA, 593 bp, Homo sapiens
  source 1..593: mol_type = other DNA
tatcacctatgaattatttttgtgaaaaagcaaaacagaacaacagaagccctctagatctgtcagtttatagaacatataggggacagaaaaggtgtacatgatcccattaggatacattcagtaaaatccactgaaggacaattctataggacaaacaacttagtttcttcaaaaattaaaaacaggaaagttaaatctatagattatattaacaaaatgcaagatctagatcttgcctggatcttgactcgaataaaccaactgttaaaaaaaacttacgagacaatcaggaagtttgaatattgactggtacttggcatcaaaaaatgttttagcagtcttacacaatggtattgtggttatgttcaaaaaagtaccctatctttggagttatatttgaatgtctctgatcacacagacatgaaaatactatgcctgttaatgggactcaaactgatccctgtgggttggggcaggggataggtggggatgcaggtaaacaagactgaccacaggacagctgttggaggatgggtacacagagcttcattctgctattctttttgtgcatttgtgaaaatttccataat

SEQ ID NO: 4252 - DNA, 303 bp, Homo sapiens
  source 1..303: mol_type = other DNA
gctaggcgtgatggctcatgcctgtaattccagcattttgggaagctgaggcgggcagatcacttgaggtcaggagttcgagaccagcctggccaacatggtgaaaccccgtctctactaaaaatacagaaaattagctgggcatggtggcacatgcttgtaatcccagctacttgggaggctgaggcaggagaatcgcttgagcccgggaggcaaaggttgcagtgagctgagatcaagccactacactcactccagcctggacgataagagcgaaactccgtctcaaaaaaaaaaaaagaa

SEQ ID NO: 4253 - DNA, 312 bp, Homo sapiens
  source 1..312: mol_type = other DNA
gccgggcgcagtggctcatgcctgtaagcccagcactttgggaggcggaggcgggtggatccattgaggtcaggagctcaagaccagcctggtcaacatggtgaaaccccgtctctactaaaaatacaaaaaaaaaattagctgggcgtgttggcgggagcctgtagtcccagctacacgggaggctaaggtgggagaattgcttgaacccgggaggcggaggttgcagtgagctgagattgcaccattgcactccagcctgggcgacagagcaagactctctcaaaaaaaaaaaaaaaagaaagaaagaaa

SEQ ID NO: 4254 - DNA, 508 bp, Homo sapiens
  source 1..508: mol_type = other DNA
tattgggagaaggccccccaaaatctggccataaactggccacaaaactggccataaaatctctgcagcactgtgacatgctcatgatggccataacgcccacgctggaaggttttgggtttaccggaatgaaggcaaggaacacctggcctgcccagggcagaaaaccacttaaaggcattcttaaaccacaaacagtagcatgagcgatctgtgccttaagggcatgttcctgctgcagataactagccagacccacccctttatttcaggccatcccttcatttcccataagggatacttttagttaattgaatatctatagaaacaatgctaatgactggtttgctgttaataaataagtgggtaaatctctgttcggggctctcagctctgaaggctgtgagacccctgatttcccactttacacctctatatttctgtgtgtgtgtctttaattcctctagcaccactgggttagggtctccccaactgagctggtctcggc

SEQ ID NO: 4255 - DNA, 117 bp, Homo sapiens
  source 1..117: mol_type = other DNA
tctgtgttgtttgtctttgtatagtctgcagatgtggatcctgactcctgagagaagtagctcaccgtgacgaagctgcgtttgcttttatcgatttgcaaatcaaagaagggggac

SEQ ID NO: 4256 - DNA, 83 bp, Homo sapiens
  source 1..83: mol_type = other DNA
gccctagaccgttacataactgaagactcccaccttcaggcaggattgggtagtacatgtttgtaactacctggcattgcctt

SEQ ID NO: 4257 - DNA, 7535 bp, Homo sapiens
  source 1..7535: mol_type = other DNA
tctggtgcccaacgtggagtcttttctctagggtgaaggtacgctcgagcgtggtcattgaggacaagtcgacgagagatcccgagtacatctacagtcagccttacggtaagcttgtgcgctcggaagaagctagggtgataatggggcaaactaaaagtaaaattaaaagtaaatatgcctcttatctcagctttattaaaattcttttaaaaagacggggagttaaagtatctacaaaaaatctaatcaagctatttcaaataatagaacaattttgcccatggtttccagaacaaggaactttagatctaaaagattggaaaagaattggtaaggaactaaaacaagcaggtaggaagggtaatatcattccacttacagtatggaatgattgggccattattaaagcagctttagaaccatttcaaacagaagaagatagcgtttcagtttctgatgcccctggaagctgtataatagattgtaatgaaaacacaaggaaaaaatcccagaaagaaacggaaggtttacattgcgaatatgtagcagagccggtaatggctcagtcaacgcaaaatgttgactataatcaattacaggaggtgatatatcctgaaacgttaaaattagaaggaaaaggtccagaattagtggggccatcagagtctaaaccatgaggcacaagtcctcttccagcaggtcaggtgcctgtaacattacaacctcaaaagcaggttaaagaaaataagacccaaccgccagtagcctatcaatactggcctccggctgaacttcagtatcggccatccccagaaagtcagtatggatatccaggaatgcccccagcaccacagggcagggcgccataccctcagccgcccactaggagacttaatcctacggcaccacctagtagacagggtagtaaattacatgaaattattgataaatcaagaaaggaaggagatactgaggcatggcaattcccagtaacgttagaaccgatgccacctggagaaggagcccaagagggagagcctcccacagttgaggccagatacaagtctttttcgataaaaaagctaaaagatatgaaagagggagtaaaacagtatggacccaactccccttatatgaggacattattagattccattgctcatggacatagactcattccttatgattgggagattctggcaaaatcgtctctctcaccctctcaatttttacaatttaagacttggtggattgatggggtacaagaacaggtccgaagaaatagggctgccaatcctccagttaacatagatgcagatcaactattaggaataggtcaaaattggagtactattagtcaacaagcattaatgcaaaatgaggccattgagcaaattagagctatctgccttagagcctgggaaaaaatccaagacccaggaagtacctgcccctcatttaatacagtaagacaaggttcaaaagagccctatcctgattttgtggcaaggctccaagatgttgctcaaaagtcaattgccgatgaaaaagcccgtaaggtcatagtggagttgatggcatatgaaaacgccaatcctgagtgtcaatcagccattaagccattaaaaggaaaggttcctgcaggatcagatgtaatctcagaatatgtaaaagcctgtgatggaatcggaggagctatgcataaagctatgcttatggctcaagcaataacaggagttgttttaggaggacaagttagaacatttggaagaaaatgttataattgtggtcaaattggtcacttaaaaaagaattgcccagtcttaaataaacagaatataactattcaagcaactacaacaggtagagagccacctgacttatgtccaagatgtaaaaaaggaaaacattgggctagtcaatgtcgttctaaatttgataaaaatgggcaaccattgtcgggaaacgagcaaaggggccagcctcaggccccacaacaaactggggcattcccaattcagccatttgttcctcagggttttcagggacaacaacccccactgtcccaagtgtttcagggaataagccagttaccacaatacaacaattgtcccccgccacaagcggcagtgcagcagtagatttatgtactatacaagcagtctctctgcttccaggggagcccccacaaaaaacccccacaggggtatatggacccctgcctaaggggactgtaggactaatcttgggacgatcaagtctaaatctaaaaggagttcaaattcatactagtgtggttgattcagactataaaggcgaaattcaattggttattagctcttcaattccttggagtgccagtccaagagacaggattgctcaattattactcctgccatacattaagggtggaaatagtgaaataaaaagaataggagggcttggaagcactgatccaacaggaaaggctgcatattgggcaagtcaggtctcagagaacagacctgtgtgtaaggccattattcaaggaaaacagtttgaagggttggtagacactggagcagatgtctctatcattgctttaaatcagtggccaaaaaattggcctaaacaaaaggctgttacaggacttgtcggcataggcacagcctcagaagtgtatcaaagtacggagattttacattgcttagggccagataatcaagaaagtactgttcagccaatgattacttcaattcctcttaatctgtggggtcgagatttattacaacaatggggtgcggaaatcaccatgcccgctccatcatatagccccacgagtcaaaaaatcatgaccaagatgggatatataccaggaaagggactagggaaaaatgaagatggcattaaaattccagttgaggctaaaataaatcaagaaagagaaggaatagggaatccttgctaggggcggccactgtagagcctcctaaacccataccattaacttggaaaacagaaaaaccagtgtgggtaaatcagtggccgctaccaaaacaaaaactggaggctttacatttattagcaaatgaacagttagaaaagggtcatattgagccttcgttctcaccttggaattctcctgtgtttgtaattcagaagaaatcaggcaaatggcgtatgttaactgacttaagggctgtaaacgccgtaattcaacccatggggcctctccaacccgggttgccctctccggccatgatcccaaaagattggcctttaattataattgatctaaaggattgcttttttaccatccctctggcagagcaggattgcgaaaaatttgcctttactataccagccataaataataaagaaccagccaccaggtttcagtggaaagtgttacctcagggaatgcttaatagtccaactatttgtcagacttttgtaggtcgagctcttcaaccagttagagaaaagttttcagactgttatattattcattgtattgatgatattttatgtgctgcagaaacgaaagataaattaattgactgttatacatttctgcaagcagaggttgccaatgctggactggcaatagcatctgataagatccaaacctctactccttttcattatttagggatgcagatagaaaatagaaaaattaagccacaaaaaatagaaataagaaaagacacattaaaaacactaaatgattttcaaaaattactaggagatattaattggattcggccaactctaggcattcctacttatgccatgtcaaatttgttctctatcttaagaggagactcagacttaaatagtaaaagaatgttaaccccagaggcaacaaaagaaattaaattagtggaagaaaaaattcagtcagcgcaaataaatagaatagatcccttagccccactccaacttttgatttttgccactgcacattctccaacaggcatcattattcaaaatactgatcttgtggagtggtcattccttcctcacagtacagttaagacttttacattgtacttggatcaaatagctacattaatcggtcagacaagattacgaataataaaattatgtgggaatgacccagacaaaatagttgtccctttaaccaaggaacaagttagacaagcctttatcaattctggtgcatggaagattggtcttgctaattttgtgggaattattgataatcattacccaaaaacaaagatcttccagttcttaaaattgactacttggattctacctaaaattaccagacgtgaacctttagaaaatgctctaacagtatttactgatggttccagcaatggaaaagcagcttacacaggaccgaaagaacgagtaatcaaaactccatatcaatcggctcaaagagcagagttggttgcagtcattacagtgttacaagattttgaccaacctatcaatattatatcagattctgcatatgtagtacaggctacaagggatgttgagacagctctaattaaatatagcatggatgatcagttaaaccagctattcaatttattacaacaaactgtaagaaaaagaaatttcccattttatattacacatattcgagcacacactaatttaccagggcctttgactaaagcaaatgaacaagctgacttactggtatcatctgcactcataaaagcacaagaacttcatgctttgactcatgtaaatgcagcaggattaaaaaacaaatttgatgtcacatggaaacaggcaaaagatattgtacaacattgcacccagtgtcaagtcttacacctgcccactcaagaggcaggagttaatcccagaggtctgtgtcctaatgcattatggcaaatggatgtcacgcatgtaccttcatttggaagattatcatatgttcacgtaacagttgatacttattcacatttcatatgggcaacttgccaaacaggagaaagtacttcccatgttaaaaaacatttattgtcttgttttgctgtaatgggagttccagaaaaaatcaaaactgacaatggaccaggatattgtagtaaagctttccaaaaattcttaagtcagtggaaaatttcacatacaacaggaattccttataattcccaaggacaggccatagttgaaagaactaatagaacactcaaaactcaattagttaaacaaaaagaagggggagacagtaaggagtgtaccactcctcagatgcaacttaatctagcactctatactttaaattttttaaacatttatagaaatcagactactacttctgcagaacaacatcttactggtaaaaagaacagcccacatgaaggaaaactaatttggtggaaagataataaaaataagacatgggaaatagggaaggtgataacgtgggggagaggttttgcttgtgtttcaccaggagaaaatcagcttcctgtttggatacccactagacatttgaagttctacaatgaacccatcagagatgcaaagaaaagcacctccgcggagacggagacatcgcaatcgagcaccgttgactcacaagatgaacaaaatggtgacgtcagaagaacagatgaagttgccatccaccaagaaggcagagccgccaacttgggcacaactaaagaagctgacgcagttagctacaaaatatctagagaacacaaaggtgacacaaaccccagagagtatgctgcttgcagccttgatgattgtatcaatggtggtaagtctccctatgcctgcaggagcagctgcagctaactatacctactgggcctatgtgcctttcccgcccttaattcgggcagtcacatggatggataatcctacagaagtatatgttaatgatagtgtatgggtacctggccccatagatgatcgctgccctgccaaacctgaggaagaagggatgatgataaatatttccattgggtatcattatcctcctatttgcctagggagagcaccaggatgtttaatgcctgcagtccaaaattggttggtagaagtacctactgtcagtcccatctgtagattcacttatcacatggtaagcgggatgtcactcaggccacgggtaaattatttacaagacttttcttatcaaagatcattaaaatttagacctaaagggaaaccttgccccaaggaaattcccaaagaatcaaaaaatacagaagttttagtttgggaagaatgtgtggccaatagtgcggtgatattacaaaacaatgaattcggaactattatagattgggcacctcgaggtcaattctaccacaattgctcaggacaaactcagtcgtgtccaagtgcacaagtgagtccagctgttgatagcgacttaacagaaagtttagacaaacataagcataaaaaattgcagtctttctacccttgggaatggggagaaaaaggaatctctaccccaagaccaaaaatagtaagtcctgtttctggtcctgaacatccagaattatggaggcttactgtggcctcacaccacattagaatttggtctggaaatcaaactttagaaacaagagatcgtaagccattttatactattgacctgaattccagtctaacagttcctttacaaagttgcgtaaagcccccttatatgctagttgtaggaaatatagttattaaaccagactcccagactataacctgtgaaaattgtagattgcttacttgcattgattcaacttttaattggcaacaccgtattctgctggtgagagcaagagagggcgtgtggatccctgtgtccatggaccgaccgtgggaggcctcgccatccgtccatattttgactgaagtattaaaaggtgttttaaatagatccaaaagattcatttttactttaattgcagtgattatgggattaattgcagtcacagctacggctgctgtagcaggagttgcattgcactcttctgttcagtcagtaaactttgttaatgattggcaaaaaaattctacaagattgtggaattcacaatctagtattgatcaaaaattggcaaatcaaattaatgatcttagacaaactgtcatttggatgggagacagactcatgagcttagaacatcgtttccagttacaatgtgactggaatacgtcagatttttgtattacaccccaaatttataatgagtctgagcatcactgggacatggttagacgccatctacagggaagagaagataatctcactttagacatttccaaattaaaagaacaaattttcgaagcatcaaaagcccatttaaatttggtgccaggaactgaggcaattgcaggagttgctgatggcctcgcaaatcttaaccctgtcacttgggttaagaccattggaagtactacgattataaatctcatattaatccttgtgtgcctgttttgtctgttgttagtctgcaggtgtacccaacagctccgaagagacagcgaccatcgagaacgggccatgatgacgatggcggttttgtcgaaaagaaaagggggaa

SEQ ID NO: 4258 - DNA, 545 bp, Homo sapiens
  source 1..545: mol_type = other DNA
agtaaagagatttatcaaagaactgaaaacagaactcatccagcaatcccactgccgggcagctactcgaaggaaatgattacatcaaaaagacacctgcacgtgcacgtccatcacagcaccattcacaacagcaaagacacggaatcagcctagggctccaccaacagacggctggagaaagagaatgtggtgcatatacacgatggagtactattcagccatgaaaaagtgtaaaattgtgccctttgcaggaacgtggatggaacgggagaacatagtgctgagtcaaacagttcagaaacagaaggacaaagagcacgtgtcctcacttacaggtgggagctaaatgatgtgtgcacgtggacacagagtggggaacactcacccgtggatgctcaggagggtggggcgagggatgagaaagttcccggtgcgtttgatgtacgctctctggtgatggctacactgacagccccgacttcaccactacacagtgtttccatgtaactgcacttgtaccccttatatttacaaataaaaaa

SEQ ID NO: 4259 - DNA, 306 bp, Homo sapiens
  source 1..306: mol_type = other DNA
gccaggcgtggtggctcacgcctgtaatcccagcactttgagaggccaaggtgggtgatcacgaggtcgagatcgagaccatcctggccaacacagtgaaactccgtctctactaaaaatacaaaaattagccgggcgtggtggcatgcgcctgtagtcccagctactcgggaggctgaggcaggagaatcgcttgaacttgggaagtggaggctgcagtaagccaagatcgcgccactagcactccagactggcgacagagtgagactccgtctcaaaaaaaaaaaccaaaaaacaaacaaaaaa

SEQ ID NO: 4260 - DNA, 297 bp, Homo sapiens
  source 1..297: mol_type = other DNA
ggtgtgatggctgatgcctgtaatcccagcactttgggaggcccaggtgggcgggtggcttgagcccaggagttcaagaccagcctggacaacacagtgagaccctgtctctatgaaaaattgaaaattagctgggtgtggtggtgcacaccagtagtcccagctagtcaggaagctgaggtgggaggatgccttgagccaaggaggtcaatgcggtgagccatgattgtggcactgcactccagtctgggtgacagaatgagaccgtctcaaacaaaacaaaacaagaaaacaaaa

SEQ ID NO: 4261 - DNA, 309 bp, Homo sapiens
  source 1..309: mol_type = other DNA
ggccgggcgcggtggctcacgcctgtaatcccagcactttgggaggccgaggcgggcggatcacgaggtcaggagatcgagaccatcctggctaacacggtgaaaccccgtctctactaaaaatacaaaaaattagccgggcgtggtagcgggcgcctgtagtcccagctactcgggaggctgaggcaggagaatggcgtgaacccgggaggcggagcttgcagtgagccgagatcacgccactgcactccagcctgggcgacagagcgagactccgtctcaaaaaaaaaaaaaaaaaaaaaaaaaaaa

SEQ ID NO: 4262 - DNA, 288 bp, Homo sapiens
  source 1..288: mol_type = other DNA
gccaggtgcggtggctcatgcccgtaatcccagcactttgggaggccgaggcaggcgcatcacctgaggagtttgagaccagcctgaccaacatggtgaaatcctgtctctactaaaaatacaaaaaattagccaggcgtggtggcgtgtgcctgtaatcccagctaccagggaggctgaggcatgagaatcgcttgaacctgggagatggaggttgcagtgagccgagatcatgccactgcactccagcctgggcaacagagggagactctgtctcaaaaataataa

SEQ ID NO: 4263 - DNA, 618 bp, Homo sapiens
  source 1..618: mol_type = other DNA
ggtactcacaataggatatacctgtagatcagtgaaatagaattaagagtccaggagtaaaccctgggctttatggtcaactgatttttgcaagggtgctaagaacatttgatgttgaaaagactattcagacatttggtgtatgtgcttggctgaggagccaatggggtggataggattttcaaatcgtgttttcaataagtagtgctaggagaactggacagtcacatgcaaaagtatgaagctgggcccctacctctcacacagttaatacaaaaaaattactgaaggtgaatgaatgacttaaatgtaaatgctaaaactgtaaaactcttagaagaaaacatagggataaatcttcatgaccttgaaactgtcagtggattctcagatatgacaccaaaaacacaacaaacaacaaaagacaaaaagtaaattaattgtcatcaacattaaacatgtttatgctttaaatgacactatcaaaagtgtgaaaagataacagaataggaaaaatttacctgataagaaattggcatccagaagatagatagctgtagatatatatctcaactcaataataaaaagataaataaacaaatatggaatgaccaaagg

SEQ ID NO: 4264 - DNA, 63 bp, Homo sapiens
  source 1..63: mol_type = other DNA
tagaatgatgttcctagcacataaactgctctcggtgaagatttgtttcacgaattgaatgaa

SEQ ID NO: 4265 - DNA, 197 bp, Homo sapiens
  source 1..197: mol_type = other DNA
catcagtgggaactggtcacataggtgacatccattgagggcagtattctgcatggacctccagaaagaatgagattgctctttgtgtcctgttgcggaaaaattactaacaattaaaaagcaaagtacagaacagtatatagagagaaggctacatttgtgtgaagggaacaggaaaaattggaatatttgtattt

SEQ ID NO: 4266 - DNA, 2590 bp, Homo sapiens
  source 1..2590: mol_type = other DNA
gaggaaggactcctctctaactcattttgtgaggccaacatcatcctgataccaaaaactgacagggacaccacacacaaaaagaaaacttcaggccactatccttgatgaacatcagcgcagaaatcctcaacaaaatactggcaaactgaatccagcagcacatcaaaaatcttgtccaccacgatcaagtagtctttattcctgggatgtaaggttggttcaacatatgcaaatcaataaatgtatttcatcacataaacagaacaaaagacaaacaccacatgattatttcaaaagatgcagaagaggcttttgataaaattcaacatcccttcatgttaaaaactctgaataaactaggtattgaaggaatatacctcaaaataataagagccatatatgacaaattcacagccaagatcatactgaatgggcaaaagctggaagtatttcccttgaaaaccagcataaaacaaggatgccccctctcaccactcctattcaacatagtactggaaattttggccagggcagtcaggcaagaaaaagaaataaagggcatacaaataggaagagaggaagtcaaactatctccatttgcagatgatatgatcctatatctagaacaccctatagtcttggccctaaagcttcttaagctggtaaaacaatttcagcaaagtctcagtatacaaaatcgatgtacaaaaacccctagcattcctaaaaaccaataacagttaaactgagagccaaatcaggaatgcagtctcattcacaattgccacaaaaaaattataaaatacctaggaatgaagctaaccagcgaggtgaaagatttctacaaggagactacaaaacactgctcaaagaaatcagaaatgttacaaacaaatggaaaggaaggatcaatattgttaaaaatggccatattgcccaaagcaatttatagatttaatgctatgcctattaaactatcaatgacattcttcacagaactagaaaaaactattttaaaattcacaaagaaccaaaaaacaaacccaaatagccaaggccatcctaagcaaaagaacaaagctggaggcatcatgctacttgacttaaaactatactatagggctacagtaaccaaacagcatgctatttatacaaaaacagacacatagggcaatggaacagaatggagaacccaaaaataagatcacacacctacaactatctgatctttgatgaagctgacaaaaacaagcaatggggaaataactccctattcaataaatggtgctgggagaactggctagccatatgcagaagattgaaactagaccccttccacataccatgtacaaaagataactcaagatggattaaagacttaaatttaaaacctaaactataaaaaccctggaagacaacctaggcaataccattctggacataggaacagtcaaaattttatgacgaagactccgaaaccaattgcaacaaaagcaaaacctgacaaatggaatctaattaaactacagagcttctgcacagcaaaagaaactatcaacagagtaaacagataacctacaaaataggagaaaatgttttccaactatgcatctgacaaaggtctaatatccagcatctaaaaggaacttaaacaaatttacaagaaaaaaaaacaaaacccattaaaaacctgcacgttgtgcacatgtaccctaaaacttaaagtataataataaaaaagaaaaagtgggcaaaggacatgaacagacacttttcaaaagaagacacacatgaggccaacaaacatgaaaaaaagctcaacatcagtgatcattagagaaatgcaaatcaaaaccgcaatgagataccatcttacaccagtcagaagggctatcatgaaaaagtcaaaaaccaacagatgctggtaaggttgcagagaaaaaggaacacttatacactgttgatgggattgtaaattagttcaaccattgtggaagagacagtgtggcaattcctccaagacctaaaagcagaactaccattcaacccagcaatcccattactgggtgtatacccaaaggaatataaatcattctgtcataaagacacatgcatgtgtatgttcattgcagcactattcacaatagcaaagacatggaatcaacctaaagacccatcaatagtatgttggataaagaaaatgtagtacagatacaccatggactactatgcatccattaaaaaaaagaacaagatcatgtcctttgtaaaaacatggatggagctagaggtcattatccttagcaaactaatgcaacaacagagaaccaaatactgcatgttctcacttataggtgggagctaaatgatgtcaacacatggacacatagaggggaacaacaacaaacactggagtctctcagaggatggagggtgggaggagggaaaggatcagaaaaaataactaatgggtactaggattaatacctggttgataaaataagctgtacaacaagcccccatgacacaagtttagctgtgtaacaaacctgcacatgtacccctgaacttaaaagttaaatcaaaa

SEQ ID NO: 4267 - DNA, 1965 bp, Homo sapiens
  source 1..1965: mol_type = other DNA
aaatgcagagaatcccaataagacacttcacaagaagatccctcctaagatacataatcatcagattctccaaggtcaaaatgaaagaaaaaatgttaaaggcagctagagagaaaaatcaggtcatctgtaaagggaagcccatgagactaaaaatggacctcttagcagaaaccctgcaagccaaaagagattgggggccaatattcaatatccttaaagaaaagaaattccaacccagaatttcatatctggacaaactaagcttcataagcaaaggagaaataagatctgtttcaaataagcaaatgctgaaggaattccttacctccaaacctgccttacaggagctcctgaagcaagcactaaatatggaaaggaaacaccattaccagctactaacactaaagtacacagactactgacactataaagcaaccactaaacaagtctgcaaaataaccagctaacatcatgataacaggatcaaatccacatatatcaatactaaccttgaatgtaaatgagctaaatgccccaattaaaaggcacagagtagtaagctggataaagaaccaagacccattggtatgctatcttcaagaaacctgtcttacatgcagtgacacacgtaagctcaaaacaaaagggactgagaaaaatctaccaagcaaatggaaaacagaagaaagcaggaggtgcaatactaatttcagacacaacagattttaaatcaacaacgataaaaaaagacaaagaagggcattacataatggtaaagggttaaattcagcaagaagacataattgttttaaatatatatgcacataatacaggagcactctgactcataaagcagtttcttaatgaccttcaaagaaacttaaactcccacacattaatagtgggagactttaacaccccactgacaatattagaccataaagacaaaaaattaacaaagatattcaggacctgaactcagcactggatcagatggacctggtagacagctacagaacttttcatcctaaaacaacagaatatacattttttcattgccacatggcttatactctaaaatcgatcacataatcagaaataaaagactcctcagcaaatgcaaaacttaaataataacaaccaatctctcagaccacagagaatcaaattagaaatcaagactaataaattcactcaaaaccatacaattacatggaaattgaataatctgctcctgacttacttttggttaaataatgaaaggaaggggaaaatcaagaagttcttttaaactaatgagatcaaagatacaacataccagaatctctgggacacagctaaggcagttttaagagagaaatttatagcagcaaatgcctacatcaaaaagttagatctcagtttaacaacctaacactacaattgaaagagctagataactaagagaaaaccaaccctaaagctagcagaagacaagaaataaccaaaatcagagctgaactgaaggagattgagacacgaaaaattattcaaaggatcagtgaatcctggagctgttttttttttgaaaaaattaataaaatagactgctagctaggctaataaagaagaaaagagaggagatgtatataaacacaaccagaaatagcaagtgaggtgtcaccactgaccccatagaaatacaaataatcatcaaaatattatgaacacttctatgcacataaactagaaaatctggaagaaatggataaattcctggacacacacacactctcccaagactgaaccaggaagaaattgaatctctgaacagaccagtaacaagatctgaaatagaatcagtaataaatagcctaccaaccaaaaaaaaagaaaagaaaaagcccaggagcaaacggattcacagctgaattctaccagatatacaaagaagaactggtactattactactgaaactgttc

SEQ ID NO: 4268 - DNA, 1627 bp, Homo sapiens
  source 1..1627: mol_type = other DNA
ctccctctccctctctttccacggtctccctctgatgccgagccgaagcaggacggtactgctgccatctcggctcactgcaacctccctgcctgattctcctgcctcagcctgccgagtgcctgcgattgcaggcaagcgccaccacacctgactggttttcgtatttttttggtggagacggggtttcactgtgttggccgggctggtctccagctcctaaccgcgagtgatccgccagcctcggcctcccgaggtgccgggattgcagacggagtctcgttcactcagtgctcaatggtgcccaggctggagtgcagtgacgtgatctcagctcgctacaacctccacctcccagccgcctgccttggcctcccaaagtgccgagattgcagcctctgcccggccaccaccccgtctgggaagtgaggagcgtctctgcctggccgcccatcgtctgggatgtgaggagcccctctgcctggctgcccagtctggaaagtgaggagcgtctctgcctggccgccatcccatctaggaagtgaggagagcctcttcccggccgccatcccatctaggaagtgaggagcatctctgcctggccgcccattgtctgagatgtggggagcgcctctgccccgccgccccgtctggaatgtgaggagcgcctctgcccggccgtgaccccgtctgggaggtgaggagcgtctctgcctggccgccccgtctgagaagagaggagaccctctgcctggcaaccgccccgtctgagaagtgaggagcccctccgcccggcagccgccccgtctgagaagtgaggagcccctccgcccggcagccaccccgtctgggaagtgaggagcgtctccgcccggcagccaccccgtccaggagggaggtagggggtcagccccccgccaggccagccgccccgtctgggagggaggtggggggggtcagccccccgcccggccagccgccccgtccgggagggaggtggggggggtcagccccccgcccggccagccaccccatccgggaggtgaggggcgcctctgcccggctgcccctgctgggaagtgaggagcccctctgcccggccaccaccccatctgggaggcgtgcccagcggctcattgagaacgggccatgatgacagtggcggttttgtgcaatggaaagcggggaaaggtggggaaaagactgagaaatcggatggttgccgtgtctgtgtagaaagaagtagacatgggagacttttcattttgttctgtactaagaaaaattcttctgccttgggatcctattgatctgtgaccttacccccaaccctgtgctctctgaaacatgtgctgtgtccactcagggttaaatggattaagggcggtgcaagatgtgctttgttaaacagatgcttgaaggcagagtcatcaccactccctaatctcaagtacccagggacacaaacactgcagaaggccgcagggtcctctgcctaggaaaaccagagacctttgttcacttgtttatctgctgaccttccctccactattgtcctatgaccctgccaaatccccctctgtgagaaacacccaagaatgatcaattaaaaaaaaaaaaaaaaaaa

SEQ ID NO: 4269 - DNA, 203 bp, Homo sapiens
  source 1..203: mol_type = other DNA
tcagatagacctgggccggcgtcctggctctcttcctcactagttttgttgtcttttgacagctacataatctaggtttcagtttcatcttctataaaagtggaataacagcacctcccttgtgagctgtcatgaaaactagttgggacactaagaacctaccacagtgccaaactcatggttagcattccatcaactttagt

SEQ ID NO: 4270 - DNA, 306 bp, Homo sapiens
  source 1..306: mol_type = other DNA
gccaggcatggtggctcacgcctgtaatcctaccaatttgggaggtcaacacgggtggatcacctgaggtgaggagttcgagaccagcctggtcaacatggcaaaaccccgtctctactaaaaatacaaaaattagccggtcttggtggtgcacacctgtaatcccagctactcgggaggctgaggaaggagaatcgcttgaacccgggaggtggaggttgtagtgagccaagatcacaccactgcactccagcctgggtgacagagcaaaactccatctcccaaaaaaaaaaaaaaaaaaaaaaa

SEQ ID NO: 4271 - DNA, 2019 bp, Homo sapiens
  source 1..2019: mol_type = other DNA
attcaacttcttactggaaatctacactgtacaataagaagagaaaaacaaataaaaggcatcaaatttggacagagagaaataaaccacaccttttttctagacatacatagcaaatcccaaggaatctgcaaagaaaaaaaaaaaaagcaaaaatcctcacagaattgatagagtttaaagcaagctcatggaatacaaagtcaacacacaaaaatcaagtatatttctatactaacaatccataattaggaattaaaattttaaaatgccatttacaaacatctaccaaaaaagtaaagtatttaggtataagtctagttgacatgggtaagattgtatgctgagaactacaaaacactggttaatgaaatcaaagaaaacctagaaaaatggagagacatatattcattggtcagacgactcaaattgatttacagatttaacaaaatttcaaattctcagcatggctgtttttgtagacatagacaaactgatctgaaaatttatatggaaaggcaaagaaatgagaagagccaaactaattttgaaaaataagaatgttggaggaatcacattacatagccttaagacttactataaagctacagtattcaagatagtgtgatattggtgaagcaacagttataaatcaattaaacaagactgacaatcaagaaatagatccacataaatatattcaagtgattttttatgaaggtgtaaaggcaattaaatagacgaaagacagtcttttcaacaaatggtattataacaattggataccctatgccaaagaaaaatgagaagtagcagaagaacttcgacctaagtcacatgccttatacaacaattaactcaaaatggaccactgatctaaatggaaaagtaaaggtataaaaccttcagaagaaacatccaagaaaatattcatggcctgggttaggcaagagttcctagatatggtgcctaaatcatgtctagagcataaagtttaaaaaaaaaaaaaagctgtacttcttcataattaaaattttctactcttccaaagacactgctaaagaataaaaacacaagatactgactgaaaaaaaaaaatctgcaaatcacatatgacctaggagctgtatccacattatataaagaaacttcaagtaactaaaaaaaaaaaagcaaaaaaaaatctaattttaaaatggcaaaggacatgaacagatacttcttaaaataaaatatccaaacagccaagaaacatatgaaaaaactgttcatcatcattaatcatcagagaaatgcaaatcaaaaccacaatgagatgccatctcacactagtcaggacggtgattatcaaaaagtcaaaaaataacagatgttggtgagactgtagagaaaggggaatacatacactgttgatgggaatgcaaattagttcagccactgtggaaagtagtttagagatttctcaaagaacttaagcataactaccattcaatgaagcaatcccattactggatatatatccaaaggaaaagaaaccattgtgccaaaaagacacatgccactcatatgttcactgcaacactattcacaataggaaagacatggaatcaacctaagtgcccatcaatggtggactggattaaaaaaatatggtacatatacaccatcgaatactacacagccataaaaaagaattaaatcatgtcctttgcagcaacatggatgcagctggatgccactatcctaagtgaattaatgcaggaacagaaaaccaaatactgcatgttgttacttacaagcgggagctaaacattgagtacacatggacacaaagatgggaacaacagacactggcgatgttggaggtggggaggaaaggagaggagcatgggtaccacactcactacctggataataggatcagccattccccaaacctcagcatcccgcaatatacccatgtaacaaaactgcatatgaaccctcttattccaaaataaaagttgaaaaatcaaaaaa

SEQ ID NO: 4272 - DNA, 172 bp, Homo sapiens
  source 1..172: mol_type = other DNA
agcagcctgtgtgttatcggtgtaaatgtcatccaagagataattaaaaaaaaaaaaaaaaaaaaaaagctagccaaagagtaaaaaggaaagcttaataatcactttatggtgtaaaaaaaaaaaaaaaaaaacaaaaaaaaaaaaaacaaaacaaaaacaaaaaaaaaaa

SEQ ID NO: 4273 - DNA, 2799 bp, Homo sapiens
  source 1..2799: mol_type = other DNA
aaatttggcatggcagccagaagagactgggacagtgctgtgttcagtggccagtggcttgtaatgagatagtcttcaggaggatcccagcagctgccagtgagattttccccagggactctcccaaggggtgttctgtgcacaaaattgcacgtccctttcactactgggaaagaacagagatcaggagcagatttggtcaaaggatgaggtaatcgagcatatgtagggagcctattgttttcctgtctaggctaagccatttgtccagtaccaccaagggaagcaataccacctgctttgcattttggttgaaatcagattttgagttggttttgagttgcctgagtgcactccccattgtgttgtccaaaatttgtctccatttgtttatgtatctgtcttattccttttgataccatgtaaacttgaaaatgggagatattgggttaatccttgttgagaggtctctgggaaggaaaaatattttttttagtggatcagtgattaaaagtcagcttcattaaaagctaacatccaagatgtgtgtatttatgtgtgcatgtttgtatttaaaaagccttcacgcttttgtttttgttttgtttatttctctcctagcaccttgtcttttttgagcaaaagttttttttcttcttagttcactgaattctgttttcttcattaatagctattacaacagaagctcctctggggtttctaagaaaaagtgtaatttggacacttagaaatgtctttgtttggaaaaaaaaatttttttaagtgtactgtaaaagtatcacatggtccagcctcataataattctccctttttgaaaacccaggattcagtgtgggctttgcccagtgcttaaagatccagttaaagggtaggtagtcaatatcaaaataaagttaggctccttacacagtcctatgataaatttctataattttatgtttgatttggcatccatctttaatctccctctagcaccacccagacattttctctgtgtaccttgagatgtaaatcttgccatttgatttttcccctaagagttgtttcttttaatatgcagatttagggctatttagttgacaaattccagagtaataaaccaggttatcaagagtttgcaagtctaagataggaaaaaggaagtcttatgaatctgtaaaatgtacttctattggcatgcctaatacgtctatgtatttatgtcttgtgtagaccatgttttactacggaaaatatatgaaagagttctaattaattggctcaaagaaaaataaaagtgcttaaatactttaacagaaaaagaaaaactagtcaaatccttttcaactttatgtgacttaagtaaaatctttaataaataagctagctttaaaatcattggtaaagtaatattagacatatcttaaaattaccagtatacatttttgtttgcatttattgatcaggcaattgcatacttatccctgccaaatactataaggtgtcaaaatttggcactataactataactcagcccaaaacagaatgatctttgcttgtataatttttaataaataaaatattaatattggtttaatgaagataactacttcttaaattatttagtaaaataccctaacttctaatcttgtggccttaggaagtctcgtccaaagacataaagaaagtttttctgggaaaagattgttatcatttttgtttcacagctaaactataaactaagttaatgaacaagaacagcttggaggttagaaataagatggagtcatttaggtgggatcattttcaccgtctcagttttaatattacaatggtggtttcataactttaaatgatgactgtcatggttttcataaataatctaggtaaatgattaaaatatataattagataaatgtaatgggacactcataaatttgtcataatttagaatttaaagctatattaaattaaacaactgacatttcattatttgggtattttccaataaaatatattttaggaaaacagtctttctaaaaactgtgtccttttgaaagggaactaacttttgtctaattcaaaacttatttaaaggctatatataaaacaatgtaaaagaaagttataaaaataaagagagtttcaaagattattggtaaaataaaaatatcttcaaaaaatgtaaacatttagtctaaattatgcaggtcaaatattaggtttgctaatgctttaggtcataaactgcttctttgacttaaaaattgtccaatttattttggagtgttaaattctagataagtcctggggacatatgaaattaaccatgcccctagctatgcaaaaaggtattaaagaaaagagattttatataagaaaggatcttgtatggtaatttcttgtcctaaagtaaaataactggttgtttaaaaagaggcatgttgtcagaagtcagaaagtcaaggcatgtcatagcttgtctgtgcagtcatgaaagaatttatgaaaggggatttatgcaagaaatattgcacaatttaaaggtaattagacctcctaaatgctttataaaataccactatgactcttagctgtacaacttgcctgctttacagctaggtaagacctggaacacatggagttaaacactagaataagtcagaccttatctgcacttctgtcaaggtcctaggccccacatctagtacataatgaaagcgccaaacttaacaaggttttcaccaaaagtaaaggttgttaagagttaacagtgtaacatgtatttaagaactact

SEQ ID NO: 4274 - DNA, 2867 bp, Homo sapiens
  source 1..2867: mol_type = other DNA
ttaaagagatctgagacattttataatcaaattcttaagtcaaagacaaagagagaattttgaaacttataagagaaaagaaactaattaattcaagcaaacctttataaggctatcaacagatttatcagcagaaatgtataggccaggagacaacagaaagtggaatgacatactcaaagtgctaaaagaacaaaaagcaaacttaccaaacaacaatactacagtcagcaaagatgttcttcacaaatggagaaataaggacttacccagacaaaactgtgggagttcatcaccagtgaacctgcctaatgagaaaaggtaaagagagtataggaatgtgaaaagcttaatgtaaaggtaagaatgtagtcaaatttagaattctctaatactgtaatggtgtttcataaatcacttgtaactctagaatgataattgaaagacaaaagtattaaaaatgaatatagctataataatttgttaatggatacacaatatataaagagtgtaaattatgaaactgataccataatatgttgggaagaaaagtcgatgtttagcgttttcattgtgatgaagttaagttgttatcagattcaaataaactcataactataagatgctttatgtaagcctgatgataatcacaaaaacatcccaaaacctatagtagatatacaaaaataactagcactacaaaaaaaatcaaatcataaagggaaaaagcaaatgagaaagaaaggaacaaaggaactataaaatagtaagaaaactattaaaatggcagtagtaagtccttaaataataaagtaatcatttgaaataattattttaaatgtaaatgaattaaattattcaatcaaaagacatagataactgaatgaataaaaacacaagatccaactatatgctgcctacataatagtcacttagctttaaggacacatataggctgaaactgaagtgatgggaaaaatatgcaaatgaaaggaaaatgatggcaggtgtagctatacttaaatattttctattgttttactaatccctattttattcattttggctccaatctttatcagttccttcctttttctgacttagtttctacttccttgaggtgtacagttagattgtttatttgagatttttctttttttcttaatgtaggcatttatggttataagtcaaagctgtaaaaagagacaaagaaaattattatacaataataaagtgatcaattcatcaagtgtatatagcaattgtaaatatatatgcacccaacatcagagtgcctaaatatataaagttcatattaacagaactgaagggagaaatagcaatgcaataacactagggaaatacaatgccctactttcaacaacaaataaattattcagatagatagtcaataaggaaactttgaatttgaactacactttacaccaagtaagtctaatagacatatacagaacattctacccagaaacagaagaatacacattcttttcaactcacattgaacattctccaggatagaatatacattaggccacaaagcaaatcttagaaatttaagaagatttaaataatatcgagtatcttttctgaccacaatagtattaaattagaacttaatgacaacagaaaaactgaaaaatgcacaaataggtggaaataaaacagacacctgaaaaacaaatgactgaaagaagaaatcaaaaggaaaatcaatcaaaaatatcttcacacaaatgaatatgtagatacaacataccaaagattatgaaatatagcaaagcagttctaaaaggtaaatataaagcaatacacacctacattaagaagaaaaaaagatctcaaagaaacaactaaactttacacttcaagaaaacagaaatgaagaacagcctaagcccaaaatcagaaaaagaaaaaaaaataaagattagagcagaaataaataaaagagaaactagtaaaataatagaaaagaccaattaaactaagaggtgtttctttgaaaagataaataaaatagacaaatctttagctagacttacaaaaaaaaaatcccagagaagatccaaataagtaaaatgaaagaggagacattacaactgatatcacagaaggacagaggattataagaaactattatgaacaattatacacccaaaaatttgataacctagaagaaatggataaattcatagatgcatacaactcacaaaaactaaattctgaagaaagagagaatgtgaacagatcgataataagtagggacattgaatcagtaatcaataatctcccaacaaagaaaagctcaggacatgatggcctactggtgaatcctaccaaacacttgaataaatgccaattcttctcaaactcttccaaaatattgaagacaaaggaacacttccaaactcattttacatgaccataattaccccaataccaaagccagacaaggatactacaagaaaagaaaatttcaggccaatatcccagataaagatacatgcaagaattctcaacaaaatactagcaaactgaattcaacagtgcagtaaaggatcatacacgatgtttctatctgggatgcaagaatgattcaacatacacaaatcaataaatgtggtacatcatattaacaaaataaaggataaagatcctattaccatctcaatagattcagaaaagccatcacaaaattcaagtatcttctatggtaaaaactcccaacaaattaagtatataaggtatttacctcattgtaacagaggccatatgtgacaaacccagaactagtatactcaatggtgggaagctgaaagttttttctgtaaatctggagcaagaca

SEQ ID NO: 4275 - DNA, 1063 bp, Homo sapiens
  source 1..1063: mol_type = other DNA
aaattaaccctcccacctcaatcaactgaacagacataatggaagaagcaacagctctccgacattggacaccaggtagtgcaggacagtaatccctaaagaggagaaataaaacagtgagtcctataattgccctgcctcattgcccagagagagcttagataataactgcaggaggggcaaccgaggcagggccctgcatttatcttagttgaggagatagacttggaaatccacagaggccaagacaggtaaacagcaaggagcagttatgcagagagagatacccagagacctgcccttggccttcagctgagtatcatcagtgcacgtgtgtaaagaaagagcccaaggctgggaaagaaatcgctagaaaggagcagagagagaaattccttcagctcactcagaaacaagaatactttatgttcccattaggaaaagcagacacaagacactggagggagcacccagtcttgctaagcatgggaaacaccagctctaaattaaatccactcttgtcccaccatgttgttaagctcattctcaaaagatcaaactatttccaagtcacttgactgcatctcagagctaaactcagaatatttacaggaataaaaaaatatcctgtaccaacaaggtaaaaatacaatgtctagaatccaactgaaacaaccagacacagaaagaagaataaaaatatgacccatatggaggagaaatcccaatacatcgaaacagacctagacatgacacagataacagaattagtagacagacagttattataagtataatccaaatattcaggaaggtggagaaatacctgggcatttgtcaaccagacctttggaaggtattttttaaagtctcaaagtgaacttctagagatgaaaaatatgtttgagatgaaaaatgtactagataggatactagataggattaactgcagattggacactccacaaaaaatgattaatcaacttgaagacatagcaatagaagctatcccaaatgaaatgtacagagaaaaaaaaactgaaaaaaaaaaaaagaaacagag

SEQ ID NO: 4276 - DNA, 2198 bp, Homo sapiens
  source 1..2198: mol_type = other DNA
taccaaatgttttccccttaaatttgagaacaagtgggggatgtccatgctcatcacctttcttcaatgtagtcctagaaatgctagtcaatgtaataaggcaacaaaaggaaataaaagcaaatagattgaaaagaatgaaataaaactctccatatatgctgatgaactcattgtttatgtaaaaatgccaaagtatctatcaaaaccaaaaccaaaaaaataccttctaggactaaataatatgtttagtgagatcatagaatacaagaaaaaagctaaaaaaaactattatatttctgtatgctagcaatgaacacatagaaaccaaaatcaaagacacaatctaattataatcactcaaaaaatgaaacatttaggtgtatatctaataaaacacatgctggacttggattcagaaaattaccaaaggctgcagaaatgaatcacaagtctaaataaatgtatctaaacatactatgtttatggattggagatacaacagagtaaagatgttaattcttcacaaattgatatacaacgttaatgcaatatctatcaaattatcagcaaaagtcttttttttgaaataagattattctaaaattgttatgaagagacaaatgtacttgaatagctaaaacaattttgaaaaagaataaagtgtgagagattacttgatttcaaaatttattatgtaacttgtgattaatactgtggtattggcagaggaataggcagatcaatggaacagaatagagaaacccaaaatagacccacaatagtgcagccaagttatttttgataaatgtgcacaaacaatttaatgtgcaaagaatattcttcctaataaatggtgtaggaacacttggatatctgtaggtaaaacagggaaacttgaactaaagctgacactttatacaaaaattaactcgaagtgaatcacacagttaaatgtaaaacctaaaactctaaaacttttagaagaagacataggagaaaaatttctgggactttcttcagtgcttcatgaacagttcttagatatgacaccaaaagcacaatttataaaaagaaaagtcaataaattgggcttcatcaaaactaagaatttttctctgtgaaagactttgtaaagaggctataaagacaagccataggctgggaaaaatatgcatcaatcataaatcttacaaataactcatatctaaaatgtataaggaaatctcaacacttaacagtaaaaacatctagttagaaaatgggtaaaagaaatgttgagttatttcacagagatgataaatgaatggcaaataagcacatgagaagacgtttgacatcaatagtcatcatagaagttcagggtaagcctgtgatgagatgtacctacacagctatcagaacagccaaaataaaatatggcaatagtgccaaatcccggtaaggatgtgaaaaatggggtctcttatttgttgctggtcaaaatgtaaaatggtacagccactctcgaaattgttcagcaatttcagctattgcactcctgggcatttatcccagagaaatgaagacttaggcttagccaaaaactgtatatgactgtttatagcagcatcatttgtaatagccaaaagctggacactgtagatgtcctacagtaggtgaatggttaaataaactgtgatacattgacacgatggaatgctatttaggaataaaaaggaacggactactgacatacacgacttgggtgaatctccagagcatcatgctaagtgttaaaagcccatttctgaaagtcacattctgtggattccacagaatccacattctacagcacttctacagcattctttaaatggcataattatggatatgcaaacagattagtagttgccataagttagggatggggcggaggtatgagagttgtgatgattaaggggtgacatgagggacatctttgcaagtgtggaccagctctgtctcctgaggtggggctttcactaatctacacaaggggttacatgacatggaactgcacacacgcaatgccagtgtcaatgtgctgactgtgatattgtactatagttatgttagatgtaaccatcaggcaaatggggtgaagagtacacaggatcgctctgtaacatctgtgtaacttcttgtgaatctatgattatttcaaaataaaaagttta

SEQ ID NO: 4277 - DNA, 301 bp, Homo sapiens
  source 1..301: mol_type = other DNA
gccgggcatggtggctcacctctataatcccaaaacgttgggaggccgaggcaggcgaatcatgaagccaggagtttgagaccaggctgaccaacacggtgaaacccagtctctactaaaaatacaaaaaaaattagctgggcgtggtggcaggtgcctgtaatcccagctactcaggaggctgaggcaggagaattgcttgaacccaggaggcagaggttgcagtgagccaagatcgcaccattgcactccagcccgcgcgacagtgtgagactccatctcaaaaaaaaaaaaaaaaaaa

SEQ ID NO: 4278 - DNA, 504 bp, Homo sapiens
  source 1..504: mol_type = other DNA
ctcaagccacattgctctcctgtgctctggaccaccgtattctactgcctcctggacttctccatctgagcacttcaagctcaacacatctaaaagctgaatattgatattggaccctcctgcccttcctcttctcctcccttcccttcccttccctgcagtcccattgacttcccagcctttgtgattgcattcagtatctatccaggcttccaagtgagaagcctgggtgtcaatctgggattctttctttcttatgctgctacatatacttatcaaccagttctgcctcctgatcagccccggagtcccctgtcctgaatcttccttgctcctgcttcatcctctgtctctggcaatagtcatgaaccttcctgtttccaatgccactcctgcagtccattccccaaaccgctgctgcagccatctttctaaaacaccaaacacagcatgtcagttcacagtcacttctctttcacacaggacaaaatccaaagccacagt

SEQ ID NO: 4279 - DNA, 150 bp, Homo sapiens
  source 1..150: mol_type = other DNA
agtagcttttgaaccttgaccatgctttctaaccagctgaggggcttttgaaaaagagggtgccttactgtgccccagaccaggacaatcagtatttctggggaatggagcctggcacacacacatttcttaaagctcccttggcaattc

SEQ ID NO: 4280 - DNA, 57 bp, Homo sapiens
  source 1..57: mol_type = other DNA
ggaaatagccagaaagaacactccacccctcctcctttttataactatagggtctgg

SEQ ID NO: 4281 - DNA, 456 bp, Homo sapiens
  source 1..456: mol_type = other DNA
acagagcaggagcatcgccatcttggacaagcccctcattctaaagttcaccttaataaaaaactgcctaaattcaaactgcatcagcctaatggctaaggtcagcatgaccataaaccacaaataacatctccaaccggaaacattcgaaactcctcctcgaccagagacatgctagtcccgagataacccccctccagcagggaagatgccagtctcgggataacctctctctggccggaaagatgcctgccccaagataaacttgcctcctcccagagatattccaaccctgccataaaacttctccctcaaacaggaacattccaaaattctgataatctccctcaccctaaaaccaatatatactcctagtctgtaagagaaagcgctcttgaccaaaattcaccaggagtgcctcccaggttttaactaaagaaaacctctctttaactg

SEQ ID NO: 4282 - DNA, 174 bp, Homo sapiens
  source 1..174: mol_type = other DNA
agtggctttcagcgggcccagcatggcagcagcacctgagaacctgttggagatgcacactcttggaccccaccctggcctctgagtaagacactggaagggcaggccccggtctgtgcacacaagtcctcagggagattctgactgatgcatgccagattttgagaactgctg

SEQ ID NO: 4283 - DNA, 226 bp, Homo sapiens
  source 1..226: mol_type = other DNA
cctggccaacatggtgaaaccctgtctctacaaaacatacaaaaattagtcaggtgtggtggcgggcacctgtagtcccagctactcagggggctgagacaggagaatcacttgaacccggaaggtggaggttgcagtgagccgaggtcgggccactgcactccagcctggggaaaaaagtgagactctgtctcaatacaaaacaaaacaaacaaacaaaacaaaa

SEQ ID NO: 4284 - DNA, 331 bp, Homo sapiens
  source 1..331: mol_type = other DNA
gccgagtgtggtggctcacacctgtaatcccagcactttgggaggccaaggcaggtggatcacttggatcacttgaggttgggagttcaagaccagcctggccaacatagcaaaaccccgtcttcactaaaaaaaaaaaacaaaaaaaaaactagccacgcatggtggcaggtgtgcctgtaaccctatctactagggagactgagacataagaatcacttgaatccaggaagcagaggttgcagtgagcagagattgcaccactgcacttcagcctgggtgacagagcaagactctgtctcggaaaaaaaaaaaaaaaaggataaagaaa

SEQ ID NO: 4285 - DNA, 186 bp, Homo sapiens
  source 1..186: mol_type = other DNA
ctccatcacttaagtggctgtgtgattgagtggagacacctcaatctctttgtgcctcagtttcctcacctgtcgagtgtcaacatgatggcacctaaagctgttgagacttcagaaaggtaatgtgtgaaaagtgaaaagtgcctggcatccaggaagtactcaataaataccaactattttatt

SEQ ID NO: 4286 - DNA, 494 bp, Homo sapiens
  source 1..494: mol_type = other DNA
tacagctatgttcatagcagcgttattcacaatagctaaaaagcagaagcaacccaagtgccctcccgtggatgaatggataaatgaaatgtggtccacacgtacaaaagagtaccattcagcctggaaatggacagatgttctgccatatgctgcaacgtggatgaaccttgaagacattatggaaagtgaaacaagccagtcacaaaaagacagatacattgtatgatccacttataagaggtgcttagagtaatcaaactcacagagacagaaaactgaggatggtggccaggggctgggggaacggaggaaaacagagccattgcttaatggggacagagtttcagctttgcaagatgaaaggagctctggagatgaatggtgtttatggctatagaacaacgtgaatgtatttaatgccactgaactccacttttatacatgattaagatggtaaattttatgttgtgtatattttgccacaattaaaa

SEQ ID NO: 4287 - DNA, 394 bp, Homo sapiens
  source 1..394: mol_type = other DNA
ctgtggtttgaatatgtccctcaagcttatgtgttggaaacttaatcccaaatgcaatagtgttaggaggtggggcctaatcacaggtgattaggtcataaggctctgccctcatggatggcttaacatgtttagtgaggcagtgggttagctattgtgagagtgggcttgttagaaaattgagtgcagccccctcttgcttgctggctaccatgctctcttgcttttctgccttctgccgtggggtgacacagcaagaagaccctccccagatgctggcaccatgccctgggactttccagccttcagaaccacgagccagacaaatttcttttctttataaattacccagtctgtggtattctgttatagaaacacaaaatggactaagaca

SEQ ID NO: 4288 - DNA, 186 bp, Homo sapiens
  source 1..186: mol_type = other DNA
atgatctggccctcagctactctccagggtcatgccaccctatcacccactggctcacacagacgctgaccactgcttagtttctcaaactgaagttttcctcctcagagcttttgcaaaaccttttctttgcctggaaaactccccccacaaatctttagttgtaggttccttctcatcttgcag

SEQ ID NO: 4289 - DNA, 553 bp, Homo sapiens
  source 1..553: mol_type = other DNA
tgaaaaagatctgggtgttttcattggatccaaattccacatgagccaacaacagcgtggtgtggaggctggagcacattaataagaacagtgtcctaaattcaggaggtaatgctctgcccatgccctgtgcagctcagacggtgtgtgcagtgcagtatgtaacccagggcacatttcaggggcccacagggagctgcagcttgtaaggtggagtgcagccaacagagcagagagtcagaatccccgcagagtggttgaaggcacaaggatgcgcagcaaggaagacagacttataggtggtgcgactgccatcctctggtactgaaggtgctatcatggagggagggaagtagattgaccctcctggctccagagtacggaactcagacaaacggtcagaagcttacagggaggccaattttggatcaactttaagaagaattttttaaaagctagagcaatcctaaaatggaatttgctctttataaagttgcgaatgcctcaccctggaattgcttaagcaaagttgggacgggcagttgtgagtaat

SEQ ID NO: 4290 - DNA, 77 bp, Homo sapiens
  source 1..77: mol_type = other DNA
aatactatttgacccaccaatctcattactggatatatacccaaaggaatagaaatcattctattataaaaacacat

SEQ ID NO: 4291 - DNA, 441 bp, Homo sapiens
  source 1..441: mol_type = other DNA
cacttgcatatacactattcacaatagcaaagacgtggaatcaacctaaatgcccatcggtgatagactgcataaagaaaatgtggtacatatataccacgaaatactatgcagccataaaaaagaacaagatcatgtcctttgcggggacatggatggaactgcaggtcattatccttagcaaacgaataagaaaagaaaacaaaataccgcatgttatcacttataagtgggaggtaaatgatgagaacacaaggatacactggggcctacttgagggtagagggttgaagggagagaagcagaaaaaataactattggggtactaggcttagtaccagggtgacaaaataatctgtacaacaaactactatgacacaagtttacctgtttaacatacctgcacatgtacccctgaacttaaaaaaatttttaaaaaga

SEQ ID NO: 4292 - DNA, 381 bp, Homo sapiens
  source 1..381: mol_type = other DNA
cagtcaaaagttaaatggttgccacagtttggggagggtgggaaggaggagtgagcaggtggggaaggaggggacttgtagggccaggagacgactctgcgtgatatagtaatggtgaatgcatgtcattatagatttgtccagacctgaagaacgtacaccaccaagaatgacccctaacgcaacctgtgggctttagtgaataatgtatcaatattggctcattaattgtaacaaatgtgccatgctaatgacagacgttaataataggggaaacctgcagggaccatgagaaagaaacaggggccgtgctggaactccctgaaactgccactcaatttttctgtaagcctaaaacagctcaaaaaaggaagtttatta

SEQ ID NO: 4293 - DNA, 200 bp, Homo sapiens
  source 1..200: mol_type = other DNA
ccggggtgcaagcccctggctgtcctggccagctctttaactcgagcaaattacttactctctctgagcttccctttcctcggcagtaacatggaggtattgagcagagaaattgtgaggcactgtagacacgagataattcacaaaaattgcacggcacgggacctggcacatagtcagcacttcacaaacagtggctc

SEQ ID NO: 4294 - DNA, 99 bp, Homo sapiens
  source 1..99: mol_type = other DNA
actgaggatgtttgtcaaaatacatatttctgtgccttgccccagttccacggcccaggaatctgcagttttcacaagcacccccaggtgattctggtg

SEQ ID NO: 4295 - DNA, 87 bp, Homo sapiens
  source 1..87: mol_type = other DNA
agtgttttttaataggaaacaataaaactgtaaccagcccaaatatccatcaaagagaaaatggagaagtaaatcatcgcacattca

SEQ ID NO: 4296 - DNA, 85 bp, Homo sapiens
  source 1..85: mol_type = other DNA
ccccttccaaggccctgggagtcctaacagtgcactggcagtgtctataatttatattatgaaatttgcataaggaaaacatttt

SEQ ID NO: 4297 - DNA, 63 bp, Homo sapiens
  source 1..63: mol_type = other DNA
gggatcctgcatgggatggtgctttgctgattacttcacctctgatttctttccactttcaga

SEQ ID NO: 4298 - DNA, 296 bp, Homo sapiens
  source 1..296: mol_type = other DNA
gcctctggcagctgtttcctcggtcagggtgcccctgatgcacctgcactttccacctccccgctgactgagacctggtcatcctcctgtgaggcctcccttccaggtctcctcaggcaggacccaacctccctgctctgtgctctcacagtgcctggctgatgggtcctgtctggcatttgtcacgttgttttaaggttagcatctatgagtccatttcctttgctaaattgtgaatttcttagaatcagggactatgttttatttatctttgtatctttcatacccataccagg

SEQ ID NO: 4299 - DNA, 112 bp, Homo sapiens
  source 1..112: mol_type = other DNA
cagaggttctagaaactttgatgaatgttgcaataaccagggggtgctctgaaaaggccctacggctgggctgcacctgagaaaatcaagccacagtctttctggttgggac

SEQ ID NO: 4300 - DNA, 110 bp, Homo sapiens
  source 1..110: mol_type = other DNA
gaatcatctgtggagcttcaaaagaaggggcctggagtctctgcagaccaattcaacccaaatctcgggggctctttcatgattctaatgggcaaccagggttgaaaccc

SEQ ID NO: 4301 - DNA, 164 bp, Homo sapiens
  source 1..164: mol_type = other DNA
cagccctggctgcagtgacatcacctgaggagcttttaaaagcttgaagcccagctacacctcagaccgattaaacgcaaatctctggggctgaaacccaagcattcgtagtttttaaagctcctgaggtcattccaatgtgcggccaaagttgagaactactg

SEQ ID NO: 4302 - DNA, 281 bp, Homo sapiens
  source 1..281: mol_type = other DNA
tgaagggtgacagggtatgccatcccaaaaatatgtctctggcataaggattattttaagctaaaagcacttgaaaaacagaagagtgctctaaactgcccccttttcttcatgaaacaagagaaaactcctgtaaaacatggcctccctacaccaggaacaaagaaacactcggcaccagagccgagcaaggcggagatttctacctagacgtggttcaagcagttccatcttccattagcctccccgcacactttactctcccacagctgccgctcttg

SEQ ID NO: 4303 - DNA, 286 bp, Homo sapiens
  source 1..286: mol_type = other DNA
gccgggcgcggtggctcacgccagtaatcccagcactttgggaggccgaagcgggctgattgcttgagcccagcagttcgagaccagcctggccaacatggcaaaacaccgtctctacaaaagaaaaatacaaaaattagccgagcgtggtggtggacgcctgttcagctactcaggaggccgaggtatgagaatcgcttgagcctcggaggtcgaggttgcagtgagtggagattgcgccattgcactccagcctgggcgacagagctagacgcagtctcaaaaa

SEQ ID NO: 4304 - DNA, 306 bp, Homo sapiens
  source 1..306: mol_type = other DNA
gctgggtgcagtggttcacgcctgttaatcccagcactttgggaggccaaggtgggcggatcacgaagtcaggagttcaagaccagcctgaccaacatggtgaaaacccgtctctactgaaaatacaaaaaatagccaggcatggtggcatgtgcctgtaatcccagctactcaggaggctgaggcaggagaatcacttgaacccgggaggcagaggttgcagtgagccgagatcgtgctgctgcactccagcctgggcaacagagcaagactctgtctcaaaaaaaaaaaaaaaaaaaagcaaaa

SEQ ID NO: 4305 - DNA, 2072 bp, Homo sapiens
  source 1..2072: mol_type = other DNA
caggcacactttattgtacttcgctttattgctctttgtaggtattgagttttttacaaattgaaagtttgtgacaaccctgtatcaaggaagtctatcagtgccatttttttccaacagcatgtgctcactttttatctctatgtctcatttggtaattcacataatatttcaaactttttcattaataaataactgttatggtgatctgtgatcagtgatatttgatgttagtgttgtactatagggtgccaataactctgcctatacaagatggtgtacttaatcaataaacgtgtattctgactgccttaccctccattccctcatctctttcccactctcttccctgacacacaacaaacaataatgaaattaggctagttagtaaccctacaatggcctataagtgttcaagtgaaaggaagagttgtatgtcactcattttaaatcaaaagctagaaatgattaagtctagtaaggaaggcatgtcaaaagctgaaacaggctgaaagctaggcctcttgcaccgggtagccaacttgtgaatgcaaaggaaaagttcttgaaggaaattaaaagcgctattccagtgacacacaatgctgatatagtcttcaattctatggaggctgaaagaggtgaggaaactgcagaaaaaaagtttgaagctagcagaggttggtttatgtggtttaagaaaagaagtcatctccatagcttggaagtacagggtgcagcagaaagtgctgatgtagaagctgcagcaagtaatgcagaagatctagctaagaccactgaggagggtggctacactcgacaacagagtttacatgtagacaaaacagccttctactggaagaagatgccatctaggactttgtagcttgagaggaaaagtcagcgcttgtctttaaagcttcaaaggacagactaaccctctagttaggggctaatatagttggtgagctaagttgaagccagtgctcgtttatcattctaaaaatcctagggcccttaagaattatgcaaaatctactctgcctttatcctataaatggaacaacaaagcttggatgacaacacatctttttacagcatggttagcttagtgttttaagcgcactgcttctcagcaaaaacgattccttttaaaatattattgcttattgacaaaagacctaatcacccaagagctctgatggagacatagaagattattgttgttttcatgcctgctaacacacattcattctgcagcccatggatcaaggagtcattttgactttcaagtcttattgtttatgacatacattttgtaaggctatagctgtcatagatagtgattcctctcatggatctgggcaaagtaaattgaaaaccttctggaaaggatttactattctagatgctgttaagaacatttgtgattcatgggaggcagtcaaaataccaacattaacaggagcttgggagaagttgattccaaccttatggatgacttgaaccccttcatggaggggttcaagacatcagtggaggaaataactgtggatgtggtggaaatagcaagagaaatataattcgaagtggaacctgaagttgtgactgaattgctacaatctcatggtaaaactttaatggatgaggtatttcttcctatggatgagtgaagaaggtggtttcttgaaatggaatctactcctactaaagatgctgtgaatattgttgaaattacaacacaggattcagaatatatcataaacttagttggtaaagtagtggcagggtttgagaggtttaactccaattttgaaagaagtcctactattggtaaaattctgtcaaacagcgtcgcatgctacagagaaatctttcctgaaataaagtcaatcaatgcggcagacttcattgttgtcttattttaagaaattgccacagccagtccaacctttagcaactaccaccctgatcagttagcagccgtcaacactgggaaaacaccctccaccagcaaaaagattatgacccactgaaagcccagataaccgttagcatttttagcaataaag

SEQ ID NO: 4306 - DNA, 3657 bp, Homo sapiens
  source 1..3657: mol_type = other DNA
taacaatgcttgatatacatgtaccccacactcgagcacccagctgtataaggcaaatattacatctatagggagagatagacttcaatacaataatagttggggacttcaacaatctgctctcagcatttttaacagatcacctagacggaagaatcaacatagaaacattggattttaactggattttagtaagaacagaaaataaataagctggactttagatcaaatttgacttaacatttacaaaacattttattttatccaaaagctgcagaatacacattcttctcatcagcacatggaacattctccaggataggccatatgttaggccacaaaataaatctcaacacattttaaaattaagatcaaatcaagcatctttttaaactacaatggaataaaagtagaaataacaggagctttggaaactgtacaaatacatggaaattaaacaatatgctcctgaatgaccactgggtcgatgaagaaattgagaggaaatttttaaaaatatgtttttaaatatttaatatgaaaatagaaatgcaacatacccacacctatgggatacagaaaagcagtgctaaaagggaagtatatagcactaaatgcctatatcacaaaagcagaaatattttaaataaacagcctagtgatacacctcaaggaactagaaaaccaatgacaaaccaaacccaaaattagtagaaggaaaagtatagtaaatatcagaacaaaaacaaaatagagactaaaaaacaatacaaaggatcaagagacaaaaagtgcgtgttttaaaaaaaagatacacaaaattgataaacctcctagctagactaaccatgaaaaaaggaagaagagtcaaataaaatcagaaatgagaaagaagatattataactgataccacagaaacacaaaggatcatcagagattactatgaacaactatagccaacaaaatggaaaacctagaggaaatgggtaaattcctggacacatacaaccttccaagattgaacctggaagaaatagaaaacctgaacagaccaataactggtaatgagattgaatcagtaataagtctcccaacaaagagaagcccagtagtggatgactttattgctgaaccctaccaaacctatagagaaaaactaacaccaattcttcacaaactgtttaaaaacaattgaagaggagggaatttttcctaactcattctacaaggccagcacaaccctgacaccaaaaccagagaaggacacaacgaaaaagaaagctacaggccaatatccctgatgaacacaggcataaaaatcatcaacaaaatgctagcaagctgaattcaacagtacaccaaaaagataatatactatggtcaagtgtgatttacccaaagatgcaaggatggtttaacacatgcaaatcaataaatgtgatgacatcagtggaatgaaggaaaaaactttatgattatctcaatagatgcagaaaattgtttgataaattcagtatcccttcatgataaaaaaaaactctcaacaaattagacatacaaggaacatacctcaacataataaaggccatatatgacagattcacagctgacatcatactaaatggggaaaagctgaaagaccttcttctaaaaactggaaccagagcaggatgcccacattcaccactcttattcaacatagcactagaagttctagccagagcaatcaggcaagagaaataaataaaaagcatctaaattggaaaagagtaagtcaaattgtctctttctgtagatagcatgatcttatatatagacaacctaaagactttaccaagaaaaacccttacaactgataaattcagtaaaatatcagaatataatattagtagtattttgatgcatcaatgatgaaaaagctgaaaaagaaatcaggaagacaatcccatttacaataattaaaagataaaatacctcggatctaaccaaaaaggtgaaaggtctctacaagggaaactacaaaacactaatgaaagaaataaacaaatggaaagacattccatgtgcatgaatcagaagaattaatatcattaaaatgtttacccaaagtaaacttgattcaaagcaatctctatcaaaatactattgtcatttgtcacagaaattgaaaacaaaaataccaaagttcatatgaaatcaaaaaagaatcagaatagccaaagcaaccctgagcaaaaaagaaaaagctggaagcatcacactacttaacttcaaaacattacagggctatggtaacccaaagagcatagtattgatataaacagacacacagaccaatggaacagaatagaaaacccagaaataaatacatatatttaccaccaactgattttcaccaaaggtgccaagaatgtgtatcagggaagggataccctcttcgataaagggtactgagaaaactgaatattcatctgcaaaataatgaaactagacccctaatgtctcaccatacacaaaaattaaaatgattaaagacataaatataagacctgaaattatgaaactactggaagaaaccacaggggaaatgtttcaggacataggtcaaggcaaaaattttgtggctaagatctcaaaaacaaaaatagacaaatgggactatattaagctaaaaagattctgcaaaacaaaggaaacagtcaacagagtgaagagacaatctgtagaacaggaaaatatgtgcaaactatttatccaacaagggactaatattgagaatatacaaggaattcaacagcaaaaaaaaaatcccttttaaaaagtaggcaaaggacatgaagagacatttctcaaaagaagacatacaaatggccaagtatatgaaaaaatgtttaacatcactagccatcagggaaatgcatatcaaaaccacaatgagatatcaccttaccccacttagaatgactattattaaaaagaccaaaaaaaaaatgctggcaacaatatggagaaaagggaactcttacacactgttggtggatatataaatcactacagtcattatggaaaacagtatagaggtttctcaaaaaaactgaccactaaatcagactactaaatccccactactgggtatttacccaaaagacaggaaatcggtgtatcacagggacacttgacctccatgtttactgaagcactattcacaatagccaacatacggaatcatctaagtgtctatcaatgaatgaatgaagaaagaaaatgagacatacttacacaatggaatactgtttcgctattaaaaaaatgaaattccgtcatttgcagcaacattaaaaaatgaaattccatcatttgcagcaacatggattggaactcgaggtcattatgttaagtgaaataagccaggaaaacaaatatcacatgttgtcagcaatatatgggagctaaaaaaggtgatctcatgcgagtagaaggaagattgataattaccagaggctgggaagttgcaggggttggggcgacacggtgtcacgaagagaggttggttgatgggtacaaagttacagctcgaaagaaggaataatttatattgttcaacagcacagtagggtgactatagttaataatatattttataatagctagaagag

SEQ ID NO: 4307 - DNA, 939 bp, Homo sapiens
  source 1..939: mol_type = other DNA
tataatcaagagtttcaacaatagactagaccaagcagaagaaagaatttctgaatttgaagacaggtcttttgaaataacccagtccaaccccccaaaaaaagaagaagaaaagaagaacaaagaacaaaagagagagcctatgagacaacacaaatgaaatttgaatattgggtgttatagaagaaaaagagatgggcaaaggcatagagaacctatttaatgaaataatagctgaaaacttcctacatcttggaagagatctagacatccagatacaggaagcttaaagatacccaaatagattgaacccgaaaaagtcttccccaaggtatattatcacttgaggaacatttcagcttataactgttgaaagccagacaaaaaaagaattctaaaatcaataagagaaaagtgtcaaatcacatataagggaactcccatcagactaatagattcctcagcagaaaccttacaggccaggagagaatgtgataatacattaaaagtgctaaaggaaaaagaaaactgtcacgcaagaacactatactcggcaaagttgtccttcaaaaattaaagagtaataaagtctttcccagccaagcaaaaactgagggcattcatcaccactataccagccctacgagaaatgcttaacatgttctacatctgaaagcaaaaggctgatatttgcatcatgaaaacatgaaactcactggtggagcagatacaaatgagaaaaagaaaggaatcaaatgttaccactacagaaaaccaccaaaccacaatgataaccaataagagaggaagaaatgaacaaaggatgcacaaaacaagtagaaaacaattaacaaaatggcaagaataagtcctcacctatcagtaataaccttgaatgggaactgattacatttcccacttgaaagatatagactagct

SEQ ID NO: 4308 - DNA, 261 bp, Homo sapiens
  source 1..261: mol_type = other DNA
ttgggaggccgaggcgggcggatcacgaggtcaggagatcgagaccatcccggctaaaacggtgaaaccccgtctctactaaaaatacaaaaaaattagctgggcgtagtggcgggcgcctgtagtcccagctacttgggaggctgaggcaggagaatggcgtgaacccgggaggcggagcttgcagtgagccgagatcccgccactgcactccagcctgggcaacagagcgagactccgtctcaaaaaaaaaaaaaaaaa

SEQ ID NO: 4309 - DNA, 2290 bp, Homo sapiens
  source 1..2290: mol_type = other DNA
gaagggtttcaagatagctgactagcgacacctggcacttctgcacaaagaaggaccaaaactgaacaatcacataacaagtggagcttctaagagaacaatggaattcatcagagaagtgacagggaacatctgaggcttggaaggagagggaagcaaagcagctggtccagctgcaatcagctcggagccaggagaaaccccccagtgcagagagaaggtaagcaagagatcttcagcagtctacattgccacactgactcttacagtcctagccacaggagagcccctcagcccttgtgggccctgagactagtctaaggagcatcctcaagtcctccaatgccattagtccagagaagaacttcactctgggtcccccacacaccccaagatcaagacacctgcagcatggcattattttgagaggccagcctccaccagactacatccttccccgggactcaacagcctctgtatctccacatccctctgacatcccctgactgacatctatccagaaggctgcagcatcacaacactggctggacccagcagtatagccagattcccaggactctgactcatacagtattctatgctgcagggaatcagtggtactgtgcactggggaggcagtcaccagaacaaagggaactggaattcatgctccccaaagcctgagagctgcctgggttgggccacgccattgacagcaaccccatcccccaacttccagcagcagggccactgtgcacctgcagataccttcaagggacctggaaactggtttgccaggcaccatcctggaaactgaaaacaggtctgctgcacctatcaccaccaccggcacccaagcatgccataaaggggacctgaggatcaacctgccctgcccaccacagctggcaagtgcatgcaccatcaggtaggccacctgcccaccacctctgcccacactaatgcatgttgttaaggtgaccatgggatcagcctatcccaccttccacttctagtgcctgcacacaccatcgtgggttctgatgacaggcctgccccctactctgccactgctgctggtacccagacataccatctgagggcctggggatcaacctgttcaacccaccacagcctgtgcctgtgtgtacccttgagagagctgaggataggtctatactgcccagtgtcatccctgccagttgccatgtacattggggcctggtgatcaatccactccacctgctgccattagcatctgcacatgcctctgctggtctgagaagagacctgcccagtctgccggagtttgcacatgttgtccaggcatctggggattgaccagccctgcctgctgtagcctgcatctatgtgcactattgtggggcctgagggcaggcccgccctggctgacacatcccctatcagtgaccacatgcaatatccagggtcctggggatcaatccaccccacccactgagcaggtcatgcacactgctggggagcgggggtgggagaggaagatcagcaggcttgacccacaactaccaccactggggcccaaagactgccccacctggcatccccatccccagcaaagcctcgccacagcctccccaaacaaccacagccaatccactgaggaactcacagataccactgacactgattatagctgaagaaatatggaaactaaactactgcccccacccaaaataaaagccaaagcatcctacccaaccaatacaatagatacatctatcaggaaaagtcttttcctatgaaagccaatccataaaattgaaagaagagacagttacaccagatgcacaaatatgagtgtaaggatataagaaacatgaaaaagcaaggaaacagaatgcctctgaaggaacacagtaattctctaggaacaggtttgaatgaaaaagcaatacatgaaatgcccaaaaaagaattttaaataatgttattaaacaagttcagtgcgatacaagagaacatagaacaaaaactgcagaatacattttcttgtcagcacatgaaacattctccaggataggccatatgtttggccacaaaataaatctcaacaaattttaaaattaagataatatcaagtaccttttcagactacaatggaataaaactagaaataaataataatacagagaaatcagaaaaacaacttatgatctgagtaagaaattcaacagagatagatatcataaagaaagaaccaaacagaaatactgggactgaagggttcaatgaatgaagttaaaaatat

SEQ ID NO: 4310 - DNA, 306 bp, Homo sapiens
  source 1..306: mol_type = other DNA
ggccgggcacggtgactcacacatgtagtcccagcactttgggaggcgaggtaggcggatcgtgaagtcaagagatcgagaccatcctagccaacatggtgaaaccccatctctactaaaaatacaaaaattagctgggcatggtggcgcatgcctatagtcgcagctacttgtgaggctgaggcaggagaatcgcttgaacctgggaggctgaggttgcagtgagccgagattgcaccactgcactccagcctggcgacacagtgagactctgtctccaaaaaaaagaaaaagaaaaaaaaaaga

SEQ ID NO: 4311 - DNA, 324 bp, Homo sapiens
  source 1..324: mol_type = other DNA
gctaggcatggtgattcatgcctgtaatcccaacactttgggaggccgaggtgggcggatcacgaggtcgagattgagaccatcctggccaacacggtgaaaccccgtctctaccaaaaatacaaaaattagcggggcgtggtggtgcacacctgtagtcctagctactcaggaggctgagacaggagaatcgcttgaatacgggaggcggaggctgcagtgagccgagacagtgctgcagtgagccgagatggcaccactgcactccagcctggcgacaaacggagactctgcctccaaaaaaaaaaaaaaaaaaaaaagaaa

SEQ ID NO: 4312 - DNA, 290 bp, Homo sapiens
  source 1..290: mol_type = other DNA
gccgggcgcagtggctcacacctgtaatcccagcagtttgggaagctgaggcgggcagatcatgaagtcaggaggttgagaccattctggctaacacggtgaaaccccgtctctgctaaaaatacaaaaaattagctgggcttggtggcgggcacctatagtcccgctactcgggagactgaggcaggagaatcacttgaaccctggaggtggaggttgcagtgagccgagattgcaccattgcactccagcctaggtgacagagcaagactgtttcaaatttaaaaaaa

SEQ ID NO: 4313 - DNA, 299 bp, Homo sapiens
  source 1..299: mol_type = other DNA
gcacagtggctcacgcctgtaatcccagcactctgagaggccaaggcaggcagatcacgaggtcaggagatcaagaccatcctggctaacacggtgaaaccccgtctctactaaaaataccaaaaaaaaaaaaaaaaaaattagctgggcatggtggcaggcgcctgtagtcccagctactcgggaggctgaggcaggagaacggcgtgaacccgggaggcggagcttgcagtgagccaagattgcaccactgcactccagcctgggtgacagagtgagattccatctcaaaacaaaaa

SEQ ID NO: 4314 - DNA, 292 bp, Homo sapiens
  source 1..292: mol_type = other DNA
ggctgggcacagtggctcaggcctgtaatcccagcactgttaggccaagatgggcagattgctcccaggagtccgagaccaacctgggcaacacagggagaccctgtctctacaaaatttacaaaaaatcagccaagtgtagtggtacgctcctgtgttcccagctactcagaaggctggggtggaaagatgctagagccagggaggtcaaggctgcagtgagccaagatcataccactgcactccagcccccacaacaaagcaaaaccctgtctcaaaagacaaaaataaa

SEQ ID NO: 4315 - DNA, 282 bp, Homo sapiens
  source 1..282: mol_type = other DNA
gcagtggctcatgcctgtaatccaagcactttgagaggcccaggcgggcggatcacctgaggtccggagttcaagactagcctgacaaacatggagaaaccccatccctactaaaaatacaaaattagctgggcgtggtggcacatgcctgtaatcctagctactcaggaggctgaagcagaatcacttgaacctgggaggcggaggtcgtggtgggctgagatcatgccattgcactccagcctgggcaacaagagtgaaactccagctcaaaaaaaaaaa

SEQ ID NO: 4316 - DNA, 310 bp, Homo sapiens
  source 1..310: mol_type = other DNA
ggtttagatcgcaaatcataggagaatcagcggaagggacttggatcctggagaacagaggagttgggaagaaatggcagctatgttcaaatacatacaggactctcacagggcagttttacttaggggaatcaatgaaggactcagagatgtgaattcttattcctaacactcagagctgtccagagatggaacttacttcaggacaggcagtcaggaaggtctgtggaaaggactccagcactggataagtagatggactagacagcctggcaaagttcctccaaacacaagagtctggtaacattct

SEQ ID NO: 4317 - DNA, 300 bp, Homo sapiens
  source 1..300: mol_type = other DNA
gctgggtgtggtggctcatgcctgtaatcccagctttttgggaagtcaaggcaggtgggtgacctgaggtcaggagtttgagaccagcttggccaacatggtgaaaccccatctcttactaaaaatataaaaaattagccaggcatggtggcgggcgccggtaatcccagctactcaggaggctgaggcaggagaattgcttgaacccaggaggcggaggtttcaggagctgagattgagccactgcactccagcctgggtgacggagcaagattctgtctcaaaaaaaaaaaaaaaaaa

SEQ ID NO: 4318 - DNA, 294 bp, Homo sapiens
  source 1..294: mol_type = other DNA
gctgggcgcggtggcccaagcctgtaatcccagcactttgggaggctgaggcaggcggatcacaaggtcaggagatcaagaccatcctggctaacacggtcaaaccccgtctctactaaaaatacaaaaaattagccggatgtggtggcgggtgcctgtagtcccagctactcgggaggctgaggcaggagaatggcgtgaacctgggaggcagagcttgcagtgagccgagaccgcgccactgcactccagcctgggcaacagagcaagattctgtctcaaaaaaaaaaaaaa

SEQ ID NO: 4319 - DNA, 127 bp, Homo sapiens
  source 1..127: mol_type = other DNA
atttatattagcataaaaattttaaaaccaaatgcttaacaatagggtagttggataatttaacatacgtccacataaaattaaaccattaaaatttgcttttcaagaaatatttaataacaaggta

SEQ ID NO: 4320 - DNA, 318 bp, Homo sapiens
  source 1..318: mol_type = other DNA
gccgggcgcggtggctcgagcctgtaatcccagcactttgggaggccgaggcgggtggatcacttgaggtcaggagttggagaccagcctggccaacgtgaaaccctgtctctacaaaaatacaaaaacaaaaaaacacaactatccgggcgtggcggcgggtgcctgtaatcccagctactcgggaggctgagacaggagactcgcttgaacccaggaggcggaggttgcagtgagccgagatcgtgccattgcattccagcctgggcgacagatcgatactttatctcaaaaaaaaaaaaaaaaaaaaaaaaaaaa

SEQ ID NO: 4321 - DNA, 270 bp, Homo sapiens
  source 1..270: mol_type = other DNA
ggccgggtgcagtggctcacacctgtaatcctagcattctgggaggccaaggcgggctgattgcttgagtccaggagtatgagacaaacctaggcagcatggcaaaaactcatctctacaaaaattagccgcacctgtagtcccagatacttgaggagctgaggtggaagaatcgctagagcctggcagtttgaggctgtagtgagctgagactgtgccactgcactccagcctggacaacagagcaagactctgtctcaaaaaaaaaaa

SEQ ID NO: 4322 - DNA, 303 bp, Homo sapiens
  source 1..303: mol_type = other DNA
ccaggcgaggtggctcacacctgtaatcccagcactttgggaggtcgaggtgggaggatcgcttgaggccaggagttcgagaccaccctgggcaacagagcgagatcccatcactacaaaaattcaaaaaattagccaggcatggtggtgcacacttgtagtcccagctactcaggaggctgaggtgggagaattgcttgggcccaggaattcaaggctagagtgagccgtgatcaccagtgcactctagcctgggcaacagagaaagaccctgtctcaaaaaaaaaaaaaaaaaaaaaaaga

SEQ ID NO: 4323 - DNA, 103 bp, Homo sapiens
  source 1..103: mol_type = other DNA
cctgctcccacactgtcactggatgtcatggggccaataaaatctcctgcaattgtgtatctcagacatttgtgtctttgatcctcaccctgtgaccctaagg

SEQ ID NO: 4324 - DNA, 179 bp, Homo sapiens
  source 1..179: mol_type = other DNA
aaaaatagagatggttagccagacctggtggcacatacctgttgtcccagctactagggaggctgaggtgggaggatcacttgagcctaggaggcagagatcgtagtgagtcaagatcatgccactgtactccaacctggatgacagggcaagaccctatcttaaaaaaaaaaaaaaaa

SEQ ID NO: 4325 - DNA, 116 bp, Homo sapiens
  source 1..116: mol_type = other DNA
gggcaggcgcaatggctcacacctgtaatcccagcactttgggaggctgaggtgggaggattgcttgaggccaagagttcaagatcagcctgggcaacatagcaagaccccgtatc

SEQ ID NO: 4326 - DNA, 155 bp, Homo sapiens
  source 1..155: mol_type = other DNA
agctgtgcgtgctggcatgtgcctgtaatcccagctacttgggagactgaggcgggagaatcacttgaacccaggaggtggaggttgcagtgaactgagaccatgccactgcactcactgacagagcaagactctgtctcaaaaaaaaaaaaaaa

SEQ ID NO: 4327 - DNA, 119 bp, Homo sapiens
  source 1..119: mol_type = other DNA
cctggaacccagcactctggaaggccaaggtgggaggattgcttgagtccaggagttcgagaccagcctgggcaacatagcaagacctcatctctattttttatcaaaaaaaaacaaaa

SEQ ID NO: 4328 - DNA, 321 bp, Homo sapiens
  source 1..321: mol_type = other DNA
ggccaggcacagtggctcacgcttgtaatcccagcactttgggaggccaagacgggtggatcacctgatgtcaggagtttgaggccagcctggccaacatggcaaaaccccatctgtactaaaaatacaaaaaattagctgggtgtggtggcaggcacctgtaatcccagctactcaggaggctgaggcaggagaattgcttgaacccgggaggcggaggttgcagtgagccaagatcctgccactgcattccagcctgggcaactgggtgtctccagtgggagacactgtctcaaatttaaaagaaaaaaaaaaaaaaga

SEQ ID NO: 4329 - DNA, 278 bp, Homo sapiens
  source 1..278: mol_type = other DNA
ggcccggcgcggtggctcccgcctgtaatcccagcactttgggaggccgaggcgggcggatgagttgaggtcgggagtttgagtccccgtctctactaaaaatacaaaattagccggacaaggtggcgcatgcctataatcccaggtactcaggaggctgaggcaggagaatcacttgaacctgggaggcagaggttgcagtgagccaagattgtgccactgcactccagcctgagcaacaaaagcaaaactctatctttaaaaaaaaaaaaaaaaaa

SEQ ID NO: 4330 - DNA, 300 bp, Homo sapiens
  source 1..300: mol_type = other DNA
gctgggaacagtggctcacacctgtaatcctagtactttgggaggtcaaggcaggcagattacttgaggtcaggggtccgagaccagcctggccaatatggcggaaccctgtctctactaaaactacaaaaactggccagggatggtggcgcacacctgtcatcccggcttctcaggaggctgaggcaggagaatcgcttgaaccggggacgcaaatgttgcagtgagccaagattgtaccactgcgctccagcctggacaacagagcgagactccatctcaaaaaaaaaaaaaaaagaa

SEQ ID NO: 4331 - DNA, 510 bp, Homo sapiens
  source 1..510: mol_type = other DNA
gagtaacataagcaagatgatggaacaggaggtcctgcaggcatatcccacaacagaatgtggaagccatgccaaacaaaactgcatttataagagccttgggatccaggtcagtttgtgacagctggaggcaaagaccaaggggaacaatttgagagagtaagcccttggccaagtggcgtgcttgccaatcatggtcccagctccaaaacaaaatactgccacatcccactgtagatttagctatagctcactaggccttggtcctgccactgcaaccatctgccaaaaacccaggagaattgatactcacctgagacttaggtgacaggcctgcaaaacttggttctgtctgtagtccctgaatcagacaaaactcaccttctttacttctcaggcatggtcagggagaaatcttgtccacacagggaccctcagggaaaaacatccatctatttccttggatgtaggacaatcaatattgaactgaatgtggatcatgaaatggtt

SEQ ID NO: 4332 - DNA, 2638 bp, Homo sapiens
  source 1..2638: mol_type = other DNA
tgatcgagattgctgactagaagcagctagactgtgcagttctcatagacaggaatgcaaggtatacataaatacagcacctgcaactgaaacatccaggtacttgcattgggaataatcaaagaaacaatctatggagaatggagtaaagcaaggcaggacaatgggccacctgggaacaacatggagccaagggaacctccccacccagtaaagcagtgagtgcatgtgtgaccctagaaacccatgattctcccacagatctctgcaaccttcaggtgaggagataccctcatgaacccacttcaccaaggccttcagtttaacacacagagctacatggagtctcagcagataagccacttaggcctgcgcagattcaagagccttagatactggctttccaggcttcccagaaaaagtagctgcaactcgagcaaagcaggttacacccctgaacatacccataggaaagaggcagaatccagggggctgatagtgatggtctgtaggacccacttcaacaatgcctcacgtggtaagacctactggcttagattccagccaaccattggtagcagcactgcacctccctgggatggagctaccagaaagaggagtgggccaccatctttgctgcttgagcaacttagccattccagccttcaggctttgaagagcccaagctgaccggggggcggaaaggatctcctagcacagtacaggtgctctaaaaagacatggccagactgcctgttaaagcaggtcccccgtttcattccttctcactggaaagtacttcccaatgagggtctccagctaccaccaccagcgctctttggttgatggagttttgaaacctctttgggatacagttcctagagggaggagtgagctgccatttttgctgtttgtgtgagttagctgttccagccttctggctttggagaatccaaataaactgggggtggaagtggtacctctgaatagcagagctgtcctgcaaaaatatggctagactgctttcttaagtgggtccccaatcatgttttcctcactgggtaggaccttcaacaggggcttccagctacctcctacaggtgcttttgggctggcaacaggtctatacctccctgggatggcgctcccagagaaaagggcatgctgccattgttgctgttttgcagcattcagtggtgataacttccagtactggaaaatctgaggtgactagaaactgtagtggacacccagcatactgcagcagcccttcagaagtggtcggactgttacgtgagtgcctgttctcatatattctcacgaggcaggttctccaggcccgggccactagccaatcattgccagagctattgagccagtagcagcttagcaactccctggacagagcctccaggggcctctgcagtacaactgtccttgctaccctcagactaataaaaaatcccaaaccctaagtgccttattcacacctcaaactgcagtttacccaaggagaggaagccagcccatcctccatgggtcccacaaactacccactgctcctcagcagacagtaaacccctaacttggccaaaagtaaagatcttccatcctgggctggctgcactgagtaattgctgacctacatctctctgagatgcagcccccagaagacaagcaaagagataatgcagcaagccagctcatgtggtggccagagggtttggtgcaagagcatctgtagtaaagtgtggccagtgatggccatttctctaggctcaactgtctcccataagagactttagccctacgggaactgttgggcctaatttctgcaggatggtcttgcaaatcagaagaagctggtccaactgagcactccttggtctgctggcctctcccagggacccagtctggccacagctgcttacagggcagtctcaggtaccctggaagctcataccagagcatctgcactggagggacatgcctgactcatgaagagctccagcaaagcagcccctatgactgcaccagcccacatttcttccccatactgcagcttcccgtgacaccatggcaactcctgatatttctttgctggcacatgtctgcaaaggcaggtttggctttgcttgccccaccagcaaatgggaatgcaatatgccccgccacccccagcaactgccattgtagatgaaactttggtgggcagagagccagaaaactccacccctgcctttgtgctaacactgtgcagagaacagggtaacctcccacactctgaacaatcactctttcttggggggcacagagaaggcatcaaaacctttactggccagtatcctgccccaagccaacaccacctttagtgcaacagcacacagcctccagcaggtatcccccactcccttcccagctgctttgctcctgccactgaggtgagtacccaaagacaggcagaaatcccatatccactagcactctgctccagctatggcaccttcatcccacaaactcgcaaactccaaatctcaaggagccagagaacacagttggggctcaaaacaagtcccccggagttagagtatgcagcctctgagttgtgagctgagcattgcccacccaccaccaccac

SEQ ID NO: 4333 - DNA, 303 bp, Homo sapiens
  source 1..303: mol_type = other DNA
ccagttgtgctggctcacatctgtaatgccagcactttgggaggccaaggtgggtggatcacctgagggcaggagtctgagaccagcctggccaacatagcaaaaccccatctctattaaaaattttacaaaaattagctgcgtgtggtggcaggcccctgtaatcccagctaattgggaggctgaagcaggagaattgctcaaacctgggaggcgaagattgcagtgagctgaaatcacaccactacactccagccaaagcaacaagagcaaaaacttcgtctcaaaaacaaaacaaaaaaa

SEQ ID NO: 4334 - DNA, 200 bp, Homo sapiens
  source 1..200: mol_type = other DNA
tatagtcaatagcaatttacttgtacattttaaagtaactaaaagtgtagaatcggtttgtaatacaaatgataaatgctggagttgatggatatttcatttgccctgatgtgattaatacctattcatatgcctgtatcaaaatatgccatatatggcataaatatatacacacactatgtacccacaaaagttaagaa

SEQ ID NO: 4335 - DNA, 485 bp, Homo sapiens
  source 1..485: mol_type = other DNA
gagaccctgcttgagacagaagtgaaaaatgcagaggaaaatcagtgccctgtggagtgtgaaaataattaagtggcaggcaattagactgaggtggctccagtcctagggttgctacttgcaaaaaaatctaactcgaatgatttttttctaaagtattacattgggggaaaataaaattcaggcttaaccaactataaactgccaattaacctctcattacatgaccagggaatttccaccttgatcgtacaaattaagaaactacataactttacctaaccaattattgaatttgctttcctttatcatgcactttataaaagtgttttcttcaagccccttccataaaccacaaactacaaaacatagcttggtgctctacaattcttgaattactctttaattaaattctttaatatttctgcggagacttccacaaatttttaatagaaaaaaagggggactgggaaccccgcagacca

SEQ ID NO: 4336 - DNA, 269 bp, Homo sapiens
  source 1..269: mol_type = other DNA
tacaactttgtagggggagcattttagcaaagctatttcaaaagcgtgaaaagtccaactgatcaataaatttactcagaaatttacactaacgggatgcttccaaaattttaaattactaagcgttatttatattagcataaaaattttaaaaccagatgcttaacaatagggtactgctgaataatttaacatatgtccacataaaattaaaccattaaaatctgctttttcaaggaatatttaataaggtaggtaatatatgctta

SEQ ID NO: 4337 - DNA, 269 bp, Homo sapiens; identical to SEQ ID NO: 4336
  source 1..269: mol_type = other DNA

SEQ ID NO: 4338 - DNA, 294 bp, Homo sapiens
  source 1..294: mol_type = other DNA
cctggcacggtgactcatgcttgtaatcccagcactttgggagggcaaggcaggcggatcacctgaggtcaggagtttgagaccagcctcaccaacatggaaaaaccccatctctactaaaaaaatacaaaattaaccaggggtgatggcacattcctgtaatcccagctactcgggaggccgaggcaggagaatcgcttgaacccgggaggcagaggttgaggtgagccaagattgcaccattgcactccagcctgggcaacaagagcaaaacttcatctaaaaaacagaaaa

SEQ ID NO: 4339 - DNA, 223 bp, Homo sapiens
  source 1..223: mol_type = other DNA
gactagcctggccaatatggcaaaaccctgtctctactaaaaatacaaattttagcagggtatagtggtacgtgcctgtaagtcccagctactcaggaggctaaggcaccagaatcgcttgaatctgggaggcagaggttgcagtgagcagagatcgtgccactgcactcctgggcaacacagcgagactgtctcaaaaaaaaaaaaaaaaaagagagagaca

SEQ ID NO: 4340 - DNA, 280 bp, Homo sapiens
  source 1..280: mol_type = other DNA
tgtgacagttaattttatgtgtcaacttggctagactttggtgtccagttgtttgatcaaacaccaatctagatatgtctgtgaaggtatattttagatgtgattaacacttaaatcaacagatttctagtaaagtggattaccctccataatacaggaaggcctcatctaacaggtaaaggctttaagagcaaagactgaggtttcctggaaaagaactacaacatagaaaccctgcctgtgtgtccagcctgctaccgagcagaatctggagttaaga

SEQ ID NO: 4341 - DNA, 110 bp, Homo sapiens
  source 1..110: mol_type = other DNA
tatacactagctttcctaaacttcttcctgtcacctaattatgctgtgttctgtcttgccattgtgcttttgcacacaagttcctttggtttagaatatccctccctctg

SEQ ID NO: 4342 - DNA, 124 bp, Homo sapiens
  source 1..124: mol_type = other DNA
gaccaggtgcagcagcttacgcctgtaatcacagctctttgggagaccgagatgggaggatcatttgagctcaggagttcgagaccagcccacactgagaccctgtctctttaagaaagaaaag

SEQ ID NO: 4343 - DNA, 143 bp, Homo sapiens
  source 1..143: mol_type = other DNA
ttccttcctactttctgtaaaacttttacagcttcctcaggtcaattacatgctccttttcattatgctcccattgtccctttgcgtatttccacggaggcactcatcacattttattgttattgtttacatatctgtctgtc

SEQ ID NO: 4344 - DNA, 303 bp, Homo sapiens
  source 1..303: mol_type = other DNA
ggccaggcatagtggctcacacctgtaaccccagtactctgggaggctgaggtacatggattgcctgaactcaggagtttgagaccagtctggccaacatggggctctaccaaaaatacaaaaaaaaaaaaaaaaaattagctgggcatggtgatgcgtgcctgtaatcccagctactcgggaggctgagatgggaggatcacctgagcctgggagatggaggttgcagtgagcagagatcatgccactgcactccagcctggatgacacagagagactccatctcaaaaacaaaagaaggaa

SEQ ID NO: 4345 - DNA, 274 bp, Homo sapiens
  source 1..274: mol_type = other DNA
ggccgggcacggtggctcacgcctgtaatcccagcactttgggaggccgaggtgggcggatcacaaggtcaggagatcgagatcatcctggctaacaccccgtctctactaaaaatacaaaaaattagccgggcatggtggtgggcgcctgcagtccctgctacttgggagactgaggcaggagaatggtgtgagcttgcagtgggcagagatcgcgccactgcactccagcctgggcgacagagcgagactccgtctcaaaaaaaaaaaaaaa

SEQ ID NO: 4346 - DNA, 823 bp, Homo sapiens
  source 1..823: mol_type = other DNA
cttacagtaaccactataagcaaaaacaaaacaaaaagaagaggtatagctaaaaagaggagataatatataaaatggaataccaaaaaagattaatccaaaagaaggcaggaaaagagaaacaaagaaacaaaaatagatgatccaaataaaaaacaaatagcaagatggtagttttaaatccaatcagatgaataattacattaaatgtaagtggattaactctccatttaaaaggcagagactataaaactggattaacaaacaaagccagctatataaagacacagattaaaagtaaaagaatcgggaaaatataccatgtatatagtatacataaaaacactgttgtggctatattcatatcagataaagtagactttcagagggtaacagcagagataaagagaaatatttcataattacaaaagagttacttcttcaagaaggtctaaatgggtgtgttcccaataatatagatcctaaatacatgaaacaaaattgctagaaatgtaaggaaaatttgaaaaattcataattttcccaacattaataaagcagaccaaaaaatcaaataagatttagactgtaacaacactataaaatttcttgacctcactgatatttacagaactctgcaacaatcacagaatacatattttttcaactgatcacataagaccatatactggccataaaacaatattcaatatatttcaaaggactgaaacaaaccataatgagtgttctctgaccataatggtcacattagaaatcaacaacaaaaagataatgagaaaatacccaaatactagaaaagtaa

SEQ ID NO: 4347 - DNA, 352 bp, Homo sapiens
  source 1..352: mol_type = other DNA
atattataatcaaactgctgaaaaccaaaaatagggaaaaatcttatagcagtcaaagaaaaaaaattacattcataagaatgtcagctgactttcatcaaaaacatgggaagccaataaaatagtatctttttaatgttgaaagttaaaaaaaatacaaaacgaccaatagcctagaactctatgtccagcaaaatattctcaaattaaaaaaaaaacaaacacattttcaaattaaaaaaaaaaaaaaaaacctaagagcattagtagtcaacatgtctttactataagaactgctaaaggaagtgcatcaggctaaagagaaatgatgccagatgaaaatctggatctt

SEQ ID NO: 4348 - DNA, 227 bp, Homo sapiens
  source 1..227: mol_type = other DNA
gactttaaaagttattatgaatatgttaaataatttagaggaaaagatcaacagaatgggtaaagagcaaagaattccagcagagaaagggaaattctagaactgaaaaataaatgatctgaaatgaagaagtcaccagatgggtttaacagcagactggacacagaaaaagaagggatcaatgaattcaaaggtaggctaataaaaactaatcaaaactgaggccc

SEQ ID NO: 4349 - DNA, 341 bp, Homo sapiens
  source 1..341: mol_type = other DNA
aacaaattgctatagtcaccccaatctttagcaaccaccaccctgaatggtctagcagtcatcaacatggaggtaagagtctccaccagcaaaatgattatgacttgctgaaggcttggatgattgctagcattttttttttagcaataaagtattttaaattaaggcatatgcattgtgttttcttttgacacaatgctactacagactgaacagactacaatgtagtgtataacttttatatgtactgggaaaccaaattatgtgtgacttgctttattgggatattcactttattttggtggtctggaaccaaacccacagtctctccaaggtgtgcc

SEQ ID NO: 4350 - DNA, 449 bp, Homo sapiens
  source 1..449: mol_type = other DNA
ctgtcaagattattatttaagaaatacatttcttaagactatagctgccatagataccaactcctctgatggatttgcacaaagtcaactgcaaaccttctggaaagggttcatcattttagatgccattaagaacattcgtaattcatgggaggaggtcaaaatttcaatgttaacaggaatttggaagaatcagacagatgacattgagaggttcaagacttcagtggaggaaggaactgcagatgtggtagaaatagcaaaagaactataactagaagtgagcctgaagatgtggttgaattgctacaatcttatgattgaacttgaatgaatgagttgcttcttaagaatgagcagagaaagtggttcttgagatggaatctactcctggtgaagatgctgtgaatattgttgaaaagacagcaaaggatatagaatattacata

SEQ ID NO: 4351 - DNA, 203 bp, Homo sapiens
  source 1..203: mol_type = other DNA
cctttgacatttaatctggtaagtacaagtataggaaaacctactttacacagcaaatacaagtgcatgaaactcattagccccaaaaggatttctggcagaaaacacaaattattgggatacacttatggaatgacagtgccaaagctgggagagaagatgagaaaggtttgactttgaaggatgagtcaaagggcacaatc

SEQ ID NO: 4352 - DNA, 421 bp, Homo sapiens
  source 1..421: mol_type = other DNA
tagaagtgacactacgaaaaatcaaattaatgatagggagagtatacattagatgctcttccagaatgtacagcaaaagaacagagatgaagattgatagatgagagaaaatgatacctatgaaagaaaaaaatagagatttaactggtgactaatagatgtctgcaaaggagacaacagaagtggaacaaaagcatggatcaaatgtgtcattgtggaagactttccagggttgaaaatgacctgaagaataaaagagctcactgtattctaaagaacattatgaaaacgtgtctgtacctagacatattttgctggttttcttttgattttaaggatcctgaaaaaaaaaaaaaaatcctgcatatatcaaggcacaaaaaaatgagctttcaacaaagaaacaaaaatgatgctggta

SEQ ID NO: 4353 - DNA, 307 bp, Homo sapiens
  source 1..307: mol_type = other DNA
gccaggcacggtggctcatgcctgtaatcccatcactttgggaggccaaagcgggtggatcacctgaggtcaggtgttccagaccagcctggccaacatggcgaaaccccgtctctactaaaaatataaaaattagccaggcggggtggcaggcgcctataatcacagctactgagaaggctgagtcaggagaatcgcttgaacctggaggcagaggttacagcgagccgagatcatgccattgtactcgagcctcggcgacagagcaagactctttctcaaaaataaataaataaataaatatata

SEQ ID NO: 4354 - DNA, 286 bp, Homo sapiens
  source 1..286: mol_type = other DNA
ttctgaagaatgtacttgggggaaaaaaaaggaaaccaatctgagaaagatgatcttagatgcaagaagtaattgtgagcatgggaaatggtaaacatatacataaacataatactgtccatataaagtaacagtaatgatgatgtctaacatatagtgttaaaaaaagaacttaaatattcaacagtaatagcataagcattaaaagggtagttatcagagttaggatgtttgtgtggggatttaaaaatattaaataactttatcaagtagagtttgaacagta

SEQ ID NO: 4355 - DNA, 2043 bp, Homo sapiens
  source 1..2043: mol_type = other DNA
acaaaactattaaaaacagtaactacaacggttatttaggagacagacaattgtttaagcaataaaaagattaaatcaaaacatcaaaaagtcaaaatggcaatggcggtgttaaagtatagagtttttgttacttttctttgcaaagttaagtgattatcagtttaaaataacctattataagatttttttgtaagcctcacagtaaccataaagcaaaaacctataatagatacactaaaaataaatagcacaaaatcaaagcacgctgctagagaaaatcacttaccatagaggaagacagtaagagaggaaaataggaagaaagaatctacaaagcaaccaaaaacaaggaacagtatggcagtagtaaacccttacctgtcagtaataactttgaatataaatggattaaattcttcaattaagagtggcagaatggattaaaaaacaagacccatccatatgctggctacaagaaactcacttcatctgtaaagataagcacagactgaaagtgaaggtatggaaaaagataatttatgcaaatggaaaccaaaaaagagcaagagagcctatagttttatcacataaaataaacttaaatcaagatggttaaaaaaaagacaaggccattatataacgacaaaggggtcagtacagcaagaggatataacaatggtaaatatatatacacccaacaccagagcacccaaatatataaagcaaatattaatagacctaaagagagagatagactgcaatacagtaatactagggaacatccacactttcaatgtgaacagatcatccagacagaaaagaaacaaagaaacgtagacattaaactgtactctggaccaaatggacctaacagatatttacagaacattccatccaacagttgcagaatacacatttttctcaacagcacatggaatattctccaggattgatcatacattaggtcacaaaacaagttttaacaaatttttaaaattgaaattatatttatcttgtcacagtggaataaaactagaaatctataatcagaggaacattggaaacagtacaaattaatggaaattaaacaacaaatggaccaatgaagaaattttaaagtaaattttaaaatttcttgagacaaatgaaaatggaaacaaaataccaaaacctatgggatacagcaaaagcggttctaagagggaagtgtatagcaataaacgtctatatcaaaaaagtaaaaagacttcaaataacctaacgatacacctcaaggaactagaaaagcaaaaccaaacaaacccccaattttttgttctttttttctccgtgaaaaaaggcatctaaaaaacaaaccaatgttaatagaaagaaataataaaagagcagaagtaaatgaaaccaagactaaaagaatacaaagatcaatgaaatgaaaatgtttttttgaataggtaatcaaaattggcaaacctttcagaagactaagtgttggggggtggtgggtggggggagagaagacccaaataagcaaaaccagaggtgaaaaatgggacattgtaagtgataccaccgatatacaaaaagatcattagagactactatgaacaactatacaccaaaaaattgcaaagcctagaaggaatgtgtaaattctctgacacatacaacctaccaagattgaatcaggaagaaacaaaagacctcaacaaaccaataatgagtaatgagattgaagccatataaaaaaagtctctcaaccaagaaaagcccaggacctgttgcttcactgctaaattctgccagacatttaaagaactaataccaatcctactcaaactcctcaaaacaaaaatttttttggaagagaagggattacttcccaactcattctacaagggcaacattaccctgataccaaaaccagacaggatgcaacaagaaaatgacaggccaacatccctgatgaacacagatgcaaaaatcctcaacaaaatactaacaaaccaagtgcaacaatacattaaaaagatcatcctg

SEQ ID NO: 4356 - DNA, 543 bp, Homo sapiens
  source 1..543: mol_type = other DNA
gacactaaaggaaatgtaacctatacagctacacaaaacagtaaacacagcccaactcttagccagagaaacataaagcctcaaacaagaggactttttaccgcagtttcttctacccagtatatcatgtctgctttcaacaaaaacttacaagacatgctaaaaggcaaaaatcaaagttgcatgaggcataacaagaatcagaaccattgccagactcatttatggcagcgatttttggaataatcagactggaaattttaaataagtatgattaatatactaaaggctctaatggaaaaagtgaacaacatgcaagaaaggtgggtaacataagcagacaatagaaactctaagaaagaacccaaaagaaatactagaaataagcaatactataacagaaatgaagaatgcccttggacttattgatagagtggaaaggacaatagataacctgggaaagattcaatgagcttgaagatatgtcagtagaaagttccaaaacttaaactgcaaagagaaaaaagaataaatgacagaaca

SEQ ID NO: 4357 - DNA, 216 bp, Homo sapiens
  source 1..216: mol_type = other DNA
caggtgcggtggttcacgcctgtaatcccagcactttgggaggcccaggtgggtggattgcctgaggtcaggagttcaagatctgtttagccaacacagtgacaccccgtctctactaaaaatataaaataattagcaagacttggtggtgtgcgcctgtaatcccagcctgggtgacagagcgagagtctgtctcaaaaaaaaaaaaaaaaaaaa

SEQ ID NO: 4358 - DNA, 296 bp, Homo sapiens
  source 1..296: mol_type = other DNA
gccaggcacggtggctcaccctgtaatcccagcactttgggaggctgaggcaggcagatcacctgaggtcaggagttcgtagaccagcctggccaacatggtgaaactctgtctctactaaaaatacaaaaattagccaggcatggtggcacgtacctgtaatcccagctattgggaggctgaggcaggagaatcacttgaacccaataggtggaggttgcagtgagccgagatcgcgccattgcactccagcctgggggacaagagagagactttgtctcaaaaaataataataa

SEQ ID NO: 4359 - DNA, 255 bp, Homo sapiens
  source 1..255: mol_type = other DNA
ctttaggaggcccaggcaggaggatcgcttgagtccaggagttcgagaccagcctgggccacagagcaaggtcaccatctctacaaaagaaattttacaaatcagccggacatgatggcgggcacctgtggtcccaactaccagggaggctgaggtgggaggatcgcttgatagcccaggaagttgacggtgcagagatccctccactgaactccaggccgggtgacagcagagcgagatcctgtctcaaaaaaa

SEQ ID NO: 4360 - DNA, 299 bp, Homo sapiens
  source 1..299: mol_type = other DNA
ggccgagagcagtggctgacgcctggaatcccaggattttgggaggccgaggtgagaggatcatttgaagctaggagttccagaccagcctgggcaacagagggagactctgtctctacaaaaaaattttaaaattagccaggcgcgctggcacacgcctgtagtcccagctactcaggaggctaaagtgggaggattgcttgagcccaggagttggaggctgcactgagctaagctccagcctgagggacagagcaagaccctgcctcccccctccaaaaaaaaagaaaaagaaaaaa

SEQ ID NO: 4361 - DNA, 158 bp, Homo sapiens
  source 1..158: mol_type = other DNA
caggtgcagtggctcacgcctgagatcctagcatgttgggaggctgaggcaagaggattgcttgaactcaggactttgaggctgcagtgagctatgactgcaccactgcactccagcctgggtgacagagcaaaaccctgtgtcaaaagaaaaacgaa

SEQ ID NO: 4362 - DNA, 301 bp, Homo sapiens
  source 1..301: mol_type = other DNA
gctgggtgtggtagctcatgcctgtaatcccgttactttgggaggctgagatgggtggatcacttgaggtcagttgttcgagaccaaccagaccaatatagcgaaacctcatttatactaacaatacaaaaattagccaggcatgcctgttatcccagctactcgggaggctgagacaggataatcgcttgaacccaggtggaagaggttgctttgagccaagatagcgccactgcattccattctgggtgagagagtgagaagctgtctcaaaaaaaaaaaaaaaaaaaaaaaaaaaaaa

SEQ ID NO: 4363 - DNA, 323 bp, Homo sapiens
  source 1..323: mol_type = other DNA
gcagggtgcagtggctcacacctgtaatcccagcactttgggaggccaggcaggcagatcacttgaggccaggagttggagaccagcctggccaacatggtgaaaccctgtctcttctagaagcacaaaaatgagctgggcgttctggtgggcacctgtaatcccagctacttgggaggcttaggcaggagaatcactggaacccaggaggcggaggttgcagtgagccaagatcgcaccactacactccagcctaggccacaaagcaagactgtttcgcaacaacaacaacaacaacaaaaaaaaaaaaaaaaaaaaaaaaa

SEQ ID NO: 4364 - DNA, 214 bp, Homo sapiens
  source 1..214: mol_type = other DNA
tgcttttctgcattctgtgaattgttttagtgagttatcgaacttgagggcatggtgggaacctccaaatttgcagccagttggtgagaagtacatgtggtctgaggacacccaagcctgcaggtgtgtctaaagcgagggcagcctagtgggggctggtggccttaacctgtggcatttgaggtaacatcagggagttgacatcagaattgca

SEQ ID NO: 4365 - DNA, 383 bp, Homo sapiens
  source 1..383: mol_type = other DNA
gacatgttttgtagatggcaggagcttcatgaaaagaagccaatgaagggcaggacgtgtagctgtctacctacaggaaaccagccaggagcctccccacagggacttcagcacagatggccgggaaaatctgcattaacctgagctctggacctaagagaggacaaggccttgactgtttctacagactcacaagacgcaatctctgcagtccatgcccatggtgtgatctgggaaacggggggccttctaaatgccaacaacaaggaaatcaaatgtgcaacaaacagaaataccggcattgacacgggccatggggaggcctaaacagatgactgcagtccactgccaaggtcatcaaaggggtgactctgaaataataa

SEQ ID NO: 4366 - DNA, 299 bp, Homo sapiens
  source 1..299: mol_type = other DNA
ggctgggcgcagtggcttgtgcctgtaatcccaacattttgggaaaccaattcaggtggatcattagaggtcaggggttcaagaccatcctggccaacatggtgacatcccatctctactaaaaatacaataagttagctgggtttggtgttgggtgcctgtaatcccagctactcgagaggctgaggcaggataatcacttgaacctgggaggaggaggtggcagtgagctgagattgtgccattgcactccagcgtgggcaacaagagtgaaacgtcgtctcaaaaaataaaaaaaa

SEQ ID NO: 4367 - DNA, 384 bp, Homo sapiens
  source 1..384: mol_type = other DNA
tgacatggttcagctctgtatccacacccaaatctcatgtcaaattgtaattcccagtgttgtgggagggacctggtgggaggtgattggctcatgggggccgacttcccccttgctgttctcgtgatattgagtgagcgcttgtgggatctggttgtttaaaagcgtgcagccctcccacttcactctctctgtctctcctgctccaacatggccagacgtgcctgtttccccttcgccttctgccgtgattgtcagtttcctgaggcctccccagccatgcttcctgtacagcctgcagaactgtgagtcaattaaacctcttttcttcataaattacccagtttctcatagttctttatagcagtgtgaaaacaagactaa

SEQ ID NO: 4368 - DNA, 305 bp, Homo sapiens
  source 1..305: mol_type = other DNA
ggctgggaacagtggctcacacctgtaatcctagtactttgggaggtcaaggcaggcagattacttgaggtcaggggttcgagaccagcctggccaatatggcggaaccctgtctctactaaaactacaaaaactggccagggatggtggcgcacacctgtcatcccggcttctcaggaggctgaggcaggagaatcgcttgaaccggggacgcaaatgttgcagtgagccaggattgtaccactgcgctccagcctggacaacagagcgagactccatctcaaaaaaaaaaaaaaaaaaaaaga

SEQ ID NO: 4369 - DNA, 201 bp, Homo sapiens
  source 1..201: mol_type = other DNA
ggtcacgtgatgcagatagggaggccttatccacaacaacacctgtgattcctggtgtatttgggccaatcatggtagtctcattccatcatcagtaactggtttgaagtgtgagaatgtgatacaactttgggccactgaacttgtgagtaatctgctgagattttctggaaaggtttccttatacctaatgagaagaca

SEQ ID NO: 4370 - DNA, 332 bp, Homo sapiens
  source 1..332: mol_type = other DNA
ggccaggcgcggtggctcccgcctgagatcccagcacgttgggaggctgaggcaagaggattgcttgaactcaggactttgaggctgcagtgagctatgactacatcactgcactccagcccgggtgacagagcaaaaccctatctcaaaagaaaaaccaaggctgggcacagtagctcatgcatgtaatcccagctactcgggaggctgagacaggagaattgcttaaacccggggggcagaggttgcagtgagccaatatcaggccactgcattccagcctggcccacagagcaagactctgtctcaaaataaattaataaataaataaa

SEQ ID NO: 4371 - DNA, 299 bp, Homo sapiens
  source 1..299: mol_type = other DNA
ggccgggtgtggtagctcatgcctgtaatcccattactttgggaggctgagatgggtggatcacttgaggtcagttgttcaagaccaaccagaccaatatagcgaaacctcatttatattaacaatacaaaaattagccaggcatgcctgttatcccagctactcgggaggctgagacaggataatcgcttgaacccaggtggaagaggttgctttgagccaagatagcgccactgcattccattctgggtaagagagtgagacgctgtctcaaaaaaaaaaaaaaaaaaaaaaaaaga

SEQ ID NO: 4372 - DNA, 155 bp, Homo sapiens
  source 1..155: mol_type = other DNA
gccaggtgcagtggctcatgcctgagatcctagcacgttgggaggctgaggcaagaggattgcttgaactcaggactttgaggctgcagtgagctatgactgcaccactgcactccagcctgggtgacagagcaaaaccctgagtcaaaagaaaa

SEQ ID NO: 4373 - DNA, 982 bp, Homo sapiens
  source 1..982: mol_type = other DNA
gtagggaaaagaaagagagatcagactgttactgtgtctgtgtagaaagggaagacataagaaattccattttgacctgtaccttgaacaattggttggctgagatgctgttaatttgtgactttgccccaaatttgagctcacaaaaacatgtgttgtatggaatcaaggtttaaaggatctagggctgtgcaggacatgccttgttaataaaacgtttacaagcagtatgcttggtaaaagtcttcgccgttctctagtctcaataaaccagaggcacaatgtactgtgaaaagctgcagggacctctgccctggaaagccaggtattgtccaaggttctccccatgtgatagtctgaaatatagcctcatgggatgagaggctgtgccccagcccgacacccgtaaagggtctgtgctgaggtggattagtaaaagaggaaagccttgcagttgagatagaggaagggcactgtctcctgcctgcccctgggaactgaatgtctcggtataaaacccgattgtacatttgttcaattctgagataggagaaaaaccaccctatggcgggaggcgagacatgttggcagcaatgctgccttgttatgctttactccacagatgtttgggcggagggaaacataaatctggcctacgtgcacatccaggcatagtacctccctttgaacttaattatgacacagattcctttgctcacatgtttttttgctgaccttctccttattatcaccctgctctcctaccgcattccttgtgctgagataatgaaaataataatcaataaaaactgagggaactcggagaccagtgctggtgcaggtccttggtatgctaagtgccagtctcctgggcccactgttgtttctctatactttgtctctgtgtcttatttcttttctcagtctcttgtcccacctgatgagatatcccacagatgtggaggggcaggccaccccttca

SEQ ID NO: 4374 - DNA, 147 bp, Homo sapiens
  source 1..147: mol_type = other DNA
aatcccagctgctcagaaggctgaagcaggagaatcgcttgaacccaggaggcagaggttgcggtgagccaagatcgcgccagggcactccatccagcctgggaaacaagagcaaaactctctcaaaaaaaaaaaaaaaaaaaaaaa

SEQ ID NO: 4375 - DNA, 344 bp, Homo sapiens
  source 1..344: mol_type = other DNA
ggcttggtgcggtggctcatacgtgtaatcccaggcctttgggaggccaaggtgggaggatcacttgagctcaggagttccagaccattccaaagcaaaaacaaaaggattttgagatcagtgtgggcaacttagcaaaacaccatctcttaaaaaaaaaaaaaaattagccaagcttggtggtgtaagcctgtagtcccagctacttgagaggctgaggtgggaggattgtttgaacccaggaggttgaggctacagtgagctgtgattgtgccactgcactccaggttgggtaatgcagcgagactgtgtctcaaaaaataaataaaataaaaaataaataa

SEQ ID NO: 4376 - DNA, 360 bp, Homo sapiens
  source 1..360: mol_type = other DNA
gaataaaaaaaattttaaggtatgttgagtaagaatctatagagcaatgaaaatgcaagagcaatagctatgggcaccaaatggtcaatcttcttatcataatgttgagtggaagaagccaggtccaccagacacatgctgctcatttatgcaaagtttggacacaggcaaaacaaaactagtttgatcgtgatgggaaacattagagaaatgcaaagacatgaccatcataattgtcaggagaaggcattggttaggattgggaagcggcaagcagaagcatttagggattggctggcaatgttttacttctcggctgagtgagggttgcatcggtgtttatttgataacacgttctag

SEQ ID NO: 4377 - DNA, 134 bp, Homo sapiens
  source 1..134: mol_type = other DNA
ggctggggttggtggttcacgcctgtaagcccaacactttgggaggctgaggtgggaggatcctttgagcccaggagtttgagaccagcttgggcaacatagtgagaccctgtctctaccaaaaaaaaaaaaaa

SEQ ID NO: 4378 - DNA, 131 bp, Homo sapiens
  source 1..131: mol_type = other DNA
ggccaggcacagtgcattacgcctgtaattccagagctttggggggccaaggcgggcggactgcttgagctccggagttccagaccagcttgggcaacatagcgaaatccccgtctctacaaaaaaataaa

SEQ ID NO: 4379 - DNA, 299 bp, Homo sapiens
  source 1..299: mol_type = other DNA
accaggtgcggtggctcacacctataatcccatcactttgggaggccaaggcaagtggatcatgaggtcaggagttcacgaccagcctggccaacatggtgaaatcccatttctactaaaaatacaaaaattagctgggcgtggtggcaggcgcctgtaatcctagctacttgggaggctgaggcaggagaatcgctggaacccaggagacagaggttgcagtgagctgagattgcaccactgcagtctagcctgggtgacacagcaagactccatctcaaaaaaaaaaagaaaaaaaa

SEQ ID NO: 4380 - DNA, 386 bp, Homo sapiens
  source 1..386: mol_type = other DNA
gatatggttcagctctgtatccccaaccaaatctcatgtccaattgcaattcccagtgttgagggagggacctggtgggagatgattggctcatggcggctgacgtcccccttgctggtctcgtgatagtgagtgagcgctcatgggatctggttgtttagaagcatgcagcacctcctgcttcactctctctgtctctcctgctccaccatggccagaaacgtgcctgcttccccttcgccttctgccgtgattgtcagtttcttgagggctccccagccatgcttcctgtacagcctgcaaaactgtgagtcaattaaacctcttttcttcataaattccccagtttccagtagttctttatagcagtgtgaaaacagactaat

SEQ ID NO: 4381 - DNA, 339 bp, Homo sapiens
  source 1..339: mol_type = other DNA
ggccaggcgctgtggctcccgcctgagatcccagcacgttgggaggctgaggcaagaggattgcttgaactcaggactttgaggctgcagtgagctatgactgcaccactgcactccagcctgggtgacagagcaaaactctgcgtcaaaagaaaaaccaaggctgggcacagtagctcatccctgtagttccagctactcgggaggctgagacaggagaactgcttaaacccaggaggcagaggttgcagtgagccaagatcaggccaatgcattccagcctggcccacagagcaagactctgtctcaaaataaattaataaataaataaaaataaaa

SEQ ID NO: 4382 - DNA, 386 bp, Homo sapiens; identical to SEQ ID NO: 4380
  source 1..386: mol_type = other DNA

SEQ ID NO: 4383 - DNA, 339 bp, Homo sapiens; identical to SEQ ID NO: 4381
  source 1..339: mol_type = other DNA

SEQ ID NO: 4384 - DNA, 190 bp, Homo sapiens
  source 1..190: mol_type = other DNA
agggttggcaaactaggactgtttgccaaattcaggctgcctcctatttttagagtcttcctgaaacacagctacacccgtattatccatggctgctttcctgtcacagtgagtaagtagctgggactgagaaggcatggcctccaaagtctaaaatatttactctctagcactttgtagaaaaacctta

SEQ ID NO: 4385 - DNA, 292 bp, Homo sapiens; identical to SEQ ID NO: 833
  source 1..292: mol_type = other DNA

SEQ ID NO: 4386 - DNA, 293 bp, Homo sapiens
  source 1..293: mol_type = other DNA
ctgggcacagtggttcatgcctgtaatcccagcactttgtgaggtcgaggcaggtggatcacctgaggtcaggagttggagaccagcctggccaacatggtgaaacctcatctctactaatacaaaaattagccgggcatggtggcgcacgcctgtagtcccagctgctcgggaggctgaggcaggagaatcgttcgaacccaggagctggaagttgcagtaagccgagatcacgccactgcactccaacctgggcgacagagcaagactccatctcaaaaaagaaaaaaaaa

SEQ ID NO: 4387 - DNA, 1928 bp, Homo sapiens
  source 1..1928: mol_type = other DNA
ttcagtcttcaggttttctttagaaaacttgaagatctggccacagctggcgtcctggcagcggtttgctggagttgatggtcagccgtccctctgcagggtgggtcaccctcctgttaaccacgccctgccccgccccgcttcctccctctcgtgcgtcatcaagcatttgctgttgttttcctcatagtagtgataagagaaaagtgaaatatctttgtctccctgtctctgtcaaaagtgggaaaatgcaagatagaccaggagggccgtgtgtttcaagaaaagtgggagagagcatttttcttcgtggaagtacagaatattccaacatgtctcatatgcaaacaaagcatgtctgtgtccaaagaatataacctaagacgccactatcaaaccaatcacagcaagcattatgaccagtatacggaaagaatgcgtgacgagaagcttcacgagctgaaaaaagggctcaggaagtatctcttaggctcgtcagacaccgagtgtcccgagcaaaaacaagtgtttgcaaacccaagtccaacccagaaatcccccgtgcagcctgtagaggacctagctgggaacttatgggagaagttacgtgaaaaaatcaggtcttttgtggcatattctatcgcaatcgatgagatcaccgatataaataataccacccagttggccatattcatccgtggtgtcgatgagaatttcgatgtgtccgaagaacttctggatacggtgcccacgacgggtacaaaatctggaaacgagatcttttcgcgtgttgagaagagcctgaaaaagttctgtatcgactggtcgaaattagtaagcgtggcctccactggcaccccagcgatggtggatgccaataacgggcttgttacaaaactgaagtccagggtggcgacgttctgcaagggtgcggaactgaagtccatctgttgtataattcatccgaaatcactctgtgctcagaagttgaagatggaccacgtcatggacgtggtagtgaagtccgtgaactggatatgctcccggggactgaaccacagcgagttcacaaccttgctctatgagctggacagccagtatggtagcctcctgtactacacggagattaagtggctcagtcgcgggctcgtgctaaagagatttttcgaatccttggaagaaatcgactccttcatgtcatccagagggaaacccctgcctcaactgagctccatagattggatccgagacctggccttcttggttgacatgacgatgcatctgaacactttgaacatctctctccaaggacactcccaaatcgtcacgcagatgtatgacctgatccgggtgttcctagcaaaactgtgcctctgggagactcacttgacgaggaataatctggcccactttcccaccctgaaattggtttccagaaatgaaagcgatggcctgaactacattcccaaaatcgcggaactcaagaccgaattccagaaaaggctgtctgatttcaaactctacgaaagcgaactgactctgttcagctccccgttctccacgaagatcgacagtgtgcacgaggagctccagatggaggttatcgacctgcaatgcaacgcggtcctgaagacgaaatacgacaaggtgggaataccagaattctacaagtacctctggggtagctacccgaaatacaagcaccattgcgcaaagattctttccatgttcgggagcacctacatctgcgaacagctgttctccattatgaaactgagcaaaacaaaatactgctcccagttaaaggattcccagtgggattctgtactccacatcgcaacgcgatggagagaaaactcctggcagggccctatggtgggaaaggctggagtcttctagtcccaagggattgggagatgacaaaatga

SEQ ID NO: 4388 - DNA, 360 bp, Homo sapiens
  source 1..360: mol_type = other DNA
gaataaaaaaatttttaaggtatgttgagtaagaatctatagagcaatgaaaatgcaagagcaatagctatgggcaccaaatggtcaatcttcttatcataatgttgagtggaagaagccaggtccaccagacacatgctgctcatttatgcaaagtttggacacaggcaaaacaaaactagtttgatcgtgatgggaaacattagagaaatgcaaagacatgaccatcataattgtcaggagaaggcattggttaggattgggaagcggcaagcagaagcatttagggattggctggcaatgttttacttctcggctgagtgagggttgcatcggtgtttatttgataacacgttctag

SEQ ID NO: 4389 - DNA, 120 bp, Homo sapiens
  source 1..120: mol_type = other DNA
atctctctctcccaccagccatctttgatggcagaaaccatgtcttattcgtatttaatccccagctcatatttatttgggcacagagtgggcactcaaatatctgatgaacttgatgaa

SEQ ID NO: 4390 - DNA, 91 bp, Homo sapiens
  source 1..91: mol_type = other DNA
ccttctgggcctcagttctatttgtaagatggagaataatcctctctgtgaactccttgcaaagatgatatgaggctaagagaatatcaag

SEQ ID NO: 4391 - DNA, 292 bp, Homo sapiens
  source 1..292: mol_type = other DNA
catcctccattctttaccattcttgatcattcctgtctttccctacatttcacatcttgtcagcctgtcattgagccctgctgtccgtccctcagtgtgtatccccgtgctgaccctccctgcttccaacgagcctaatccagcactgcccctagcctggattgctgaacagctgcctgtgttgtctccttgcctttgcagtctttgcctctttcagattattttctgcatagcagcaagactggtctttttctttttttctaaaatgtaagttgtatcttgtcattgctct

SEQ ID NO: 4392 - DNA, 168 bp, Homo sapiens
  source 1..168: mol_type = other DNA
tttccttaacacccttcactgctctaagtcatacacataccagttgacttggttattatttgtatctccagctagagtgaaaacttggtgaggactggtattatatccctgacattaaaaatagtgtcttgttagtaaaaagtgctcagtatttttctgaatgaataa

SEQ ID NO: 4393 - DNA, 138 bp, Homo sapiens
  source 1..138: mol_type = other DNA
gccgggcgtggtggctcacacctgtaatcccagcaccttgggaggctgaggtgggaggatcatttgaggccaggagtttgagacctgcctgggcaacataatgaaacttcctttccagggaggaaaaaaaaaaaaaaa

SEQ ID NO: 4394 - DNA, 300 bp, Homo sapiens
  source 1..300: mol_type = other DNA
ggccgggcgtggtggctcatgcctgtaattccagcactttgggaggctaaggcgggaggatgacttgaggccaggagttggagaccagcctggccaacatggtgaaaccctgtctctactaaaaatacaaaaattagcctggcgtggtggtgcacacctgtaatcccagctactctggaggctgaggcaggagaatcacttgaaccctggaggcagaggttgcaatgagccgagatcacaccactacactccagcctaggcaacagagcaagactctgtctcaaaaaaaacaaaacaaaa

SEQ ID NO: 4395 - DNA, 300 bp, Homo sapiens
  source 1..300: mol_type = other DNA
ggccaggcacggtagctcacgcctgtaatcccaacactttgggaggccgaggcaggtggatcacctgaggtcagaagttcaagaccagcctggccaacatggggaaaccctgtctttactaaaaatataaaaattagctgggtgtggtggcgggcacctgtaatcccagctactcgggaggctgtggcaggagaatcgcttgaacccaggaggtggaggttgcagtgagccaagatcacaccattgcactccagcctgggcgacagagtctccatctggggaaaaaaattaaataaataa

SEQ ID NO: 4396 - DNA, 190 bp, Homo sapiens; identical to SEQ ID NO: 4384
  source 1..190: mol_type = other DNA

SEQ ID NO: 4397 - DNA, 293 bp, Homo sapiens
  source 1..293: mol_type = other DNA
ctgggcacagtggttcatgcctgtaatcccagcactttgtgaggtcgaggcaggtggatcacctgaggtcaggagttggagaccagcctggccaacatggtgaaacctcatctctactaatacaaaaattagccaggcatggtggcgcacgcctgtagtcccagctgctcgggaggctgaggcaggagaatcgttcgaacccaggagctggaagttgcagtaagccgagatcacgccactgcactccaacctgggcgacagagcaagactccatctcaaaaaagaaaaaaaaa

SEQ ID NO: 4398 - DNA, 1928 bp, Homo sapiens
  source 1..1928: mol_type = other DNA
ttcagtcttcaggttttctttagaaaacttgaagatctggccacagctggcatcctggcagcggtttgctggagttgagggtcagccgtccctctgcagggtgggtcaccctcctgttaaccacgccctgccccgccccgcttcctccctctcgtgcgtcatcaagcatttgctgttgttttcctcatagtagtgataagagaaaagtgaaatatctttgtctccctgtctctgtcaaaagtgggaaaacgcaagatagaccaggagggccgtgtgtttcaagaaaagtgggagagagcgtatttcttcgtggaagtacagaatattccaacatgtctcatatgcaaacaaagcatgtctgtgtccaaagaatataacctaagacgccactatcaaaccaatcacagcaagcattatgaccagtatatggaaagaatgcgtgacgagaagcttcacgagctgaaaaaagggctcaggaagtatctcttaggcttgtcagacaccgagtgtcccgagcaaaaacaagtgtttgcacacccaagtccaacccagaaatcccccgtgcagcctgtagaggacctagctgggaacttatgggagaagttacgtgaaaaaatcaggtcttttgtggcatattctatcgcaatcgatgagatcacggatataaataataccacccagttggccatattcatccgtggtgtcgatgagaatttcgatgtgtccgaagaacttctggacacggtgcccatgacgggtacaaaatctggcaacgagatcttttcgcgtgttgagaagagcctgaaaaagttctgtatcgactggtcgaaattagtaagcgtggcctccactggcaccccagcgatggtggatgccaataacgggcttgtcacaaaactgaagtccagggtggcgacgttctgcaagggtgcggaactgaagtccatctgttgtataattcatccggaatcactctgtgctcagaagttgaagatggaccacgtcatggacgtggtagtgaagtccgtgaactggatatgctcccggggactgaaccacagtgagttcacaaccttgctctatgagctggacagccagtatggtagcctcctgtactacacggagattaagtggctcagtcgcgggctcgtgctaaagagatttttcgaatccttggaagaaatcgactccttcatgtcatccagagggaaacccctgcctcaactgagctccatagattggatccgagacctggccttcttggttgacatgacgatgcatctgaacgctttgaacatctctctccaaggacactcccaaatcgtcacgcagatgtatgacctgatccgggcgttcctagcaaaactgtgcctctgggagactcatttgacgaggaataatctggcccactttcccaccctgaaattggcttccagaaatgaaagcgatggcctgaactacattcccaaaatcgcggaactcaagaccgaattccagaaaaggctgtctgatttcaaactctacgaaagcgaactgactctgttcagctccccgttctccacgaagatcgacagtgtgcacgaggagctccagatggaggttatcgacctgcaatgcaacacggtcctgaagacgaaatacgacaaggtgggaataccagaattctacaagtacctctggggtagctacccgaaatacaagcaccattgcgcaaagattctttccatgttcgggagcacctacatctgcgaacagctgttctccattatgaaactgagcaaaacaaaatactgctcccagttaaaggattcccagtgggattctgtactccacatcgcaacgtgatggagagaaaactcctggcagggccctatggtgggaaaggctggagtcttctagtcccaagggattgggagatgacaaaatga

SEQ ID NO: 4399 - DNA, 484 bp, Homo sapiens
  source 1..484: mol_type = other DNA
aacacaaagcttggcccatcaattccagtccttggtatacacctatgagaattgaaaacaaatgtccgcacaaaaacgtgtacaccaatgttcatagcagtattattcataacagccaaaaggtggaaattacccaaatagccatcaatggatggaaaatcaaaatgctgtgtattcatatcatggatttttattcagccataaagaaggaaagaagccagacacacaaaaaacttcttgggatgattctatccacacgaaatgtccagaataggcaaatccacggagacaaaagtgattgccaggggctggggatagggacggggtggggaccggggaatgacggcctaatggggttggggtttcttctcctcgggtgctgaaagcgttctgcaattagtggcaaaggttgcacagctctgtgcactgaattattcactcttaaaacgtgaattttacaatggatctcaacgaagctgttatt

SEQ ID NO: 4400 - DNA, 351 bp, Homo sapiens
  source 1..351: mol_type = other DNA
ggcttggtgcggtggctcatacgtgtaatcccaggcctttgggaggccaaggtgggaggatcacttgagctcaggagttccagaccattccaaagcaaaaacaaaaggattttgagatcagtgtggacaacttagcaaaacaccatctctaaaaaaaaaaaaaaaaaaaaaaattagccaagcttggtggtgtaagcctgtagtcccagctacttgagaggctgaggtgggaggattgtttgaacccaggaggttgaggctacagtgagctgtgattgtgccactgcactccaggttgggtaatgcagcgagactgcgtctcaaaaaataaataaaataaaaaataaataa

SEQ ID NO: 4401 - DNA, 360 bp, Homo sapiens
  source 1..360: mol_type = other DNA
gaataaaaaaatttttaaggtatgttgagtaagaatctatagagcaatgaaaatgcaagagcaatagctatgggcaccaaatggtcaatcttcttatcataatgttgagtggaagaagccaggtccaccagacacatgctgctcatttatccaaagtttggacacaggcaaaacaaaactagtttgatcgtgatgggaaacattagagaaatgcaaagacatgaccatcataattgtcaggagaaggcattggttaggattgggaagcggcaagcagaagcatttagggattggctggcaatgttttacttctcagctgagtgagggttgcatcggtgtttatttgataacacgttctag

SEQ ID NO: 4402 - DNA, 134 bp, Homo sapiens
  source 1..134: mol_type = other DNA
ggctggggttggtggctcacgcctgtaagcccagcactttgggaggctgaggtgggaggatcctttgagcccaggagtttgagaccagcttgggcaacatagtgagaccctgtctctaccaaaaaaaaaaaaaa

SEQ ID NO: 4403 - DNA, 131 bp, Homo sapiens
  source 1..131: mol_type = other DNA
ggccaggcacagtgcattacgcctgtaattccagcgctttggggggccaaggcgggcggactgcttgagctccggagttccagaccagcttgggcaacatagcgaaatccccgtctctacaaaaaaataaa

SEQ ID NO: 4404 - DNA, 299 bp, Homo sapiens; identical to SEQ ID NO: 4379
  source 1..299: mol_type = other DNA

SEQ ID NO: 4405 - DNA, 386 bp, Homo sapiens
  source 1..386: mol_type = other DNA
gatatggttcagctctgtatccccaaccaaatctcatgtccaattgcaattcccagtgttgagggagagacctggtgggagatgattggctcatggcggctgacgtcccccttgctggtctcgtgatagtgagtgagcgctcatgggatctggttgtttagaagcatgcagcacctcctgcttcactctctctgtctctcctgctccaccatggccagaaacgtgcctgcttccccttcgccttctgccgtgattgtcagttccttgagggctccccagccatgcttcctgtacagcctgcaaaactgtgagtcaattaaacttcttttcttcataaattccccggtttccagtagttctttatagcagtgtgaaaacagactaat

SEQ ID NO: 4406 - DNA, 339 bp, Homo sapiens; identical to SEQ ID NO: 4381
  source 1..339: mol_type = other DNA

SEQ ID NO: 4407 - DNA, 1928 bp, Homo sapiens
  source 1..1928: mol_type = other DNA
tcagtcttcaggttttctttagaaaacttgaagatctggccacagctggcgtcctggcagcggtttgctggagttgagggtcagccgtccctctgcagggtgggtcaccctcctgttaaccacgccctgccccgccccgcttcctccctctcgtgcgtcatcaagcatttgctgttgttttcctcatagtagtgataagagaaaagtgaaatatctttgtctccctgtctctgtcaaaagtgggaaaacgcaagatagaccaggagggccgtgtgtttcaagaaaagtgggagagagcgtatttcttcgtggaagtacagaatattccaacatgtctcatatgcaaacaaagcatgtctgtgtccaaagaatataacctaagacgccactatcaaaccaatcacagcaagcattatgaccagtatacggaaagaatgcgtgacgagaagcttcacgagctgaaaaaagggctcaggaagtatctcttaggctcgtcagacaccgagtgtcccgagcaaaaacaagtgtttgcaaacccaagtccaacccagaaatcccccgtgcagcctgtagaggacctagctgggaacttatgggagaagttacgtgaaaaaatcaggtcttttgtggcatattctatcgcaatcgatgagatcacggatataaataataccacccagttggccatattcatccgtggtgtcgatgagaatttcgatgtgtccgaagaacttctggacacggtgcccatgacgggtacaaaatctggcaacgagatctttttgcgtgttgagaagagcctgaaaaagttctgtatcaactggtcgagattagtaagcgtggcctccactggcaccccagcgatggtggatgccaataacgggcttgtcacaaaactgaagtccagggtggcgacgttctgcaagggtgcggaactgaagtccatctgttgtataattcatccggaatcactctgtgctcagaagttgaagatggaccacgtcatggacgtggtagtgaagtccgtgaactggatatgctcccggggactgaaccacagcgagttcacaaccttgctctatgagctggacagccagtatggtagcctcctgtactacacggagattaagtggctcagtcgcgggctcgtgctaaagagatttttcgaatccttggaagaaatcgactccttcatgtcatccagagggaaacccctgcctcaactgagctccatagattggatccgagacctggccttcttggttgacatgacgatgcatctgaacgctttgaacatctctctccaaggacactcccaaatcgtcacgcagatgtatgacctgatccgggcgttcctagcaaaactgtgcctctgggagactcatttgacgaggaataatctggcccactttcccaccctgaaattggtttccagaaatgaaagcgatggcctgaactacattcccaaaatcgcggaactcaagaccgaattccagaaaaggctgtctgatttcaaactctacgaaagcgaactgactctgttcagctccccgttctccacgaagatcgacagtgtgcacgaggagctccagatggaggttatcgacctgcaatgcaacacggtcctgaagacgaaatacgacaaggtgggaataccagaattctacaagtacctctggggtagctacccgaaatacaagcaccattgcgcaaagattctttccatgttcgggagcacctacatctgcgaacagctgttctccattatgaaactgagcaaaacaaaatactgctcccagttaaaggattcccagtgggattctgtactccacatcgcaacgtgatggagagaaaactcctggcagggccctatggtgggaaaggctggagtcttctagtcccaagggattgggagatgacaaaatgaa

SEQ ID NO: 4408 - DNA, 294 bp, Homo sapiens
  source 1..294: mol_type = other DNA
gctgggcacagtggttcatgcctgtaatcccagcactttgtgaggtcgaggcaggtggatcacctgaggtcaggagttggagaccagcctggccaacatggtgaaacctcatctctactaatacaaaaattagccgggcatggtggcgcatgcctgtagtcccagctgctcgggaggctgaggcaggagaatcgttcgaacccaggagctggaagttgcagtaagccgagatcacgccactgcactccaacctgggcgacagagcaagactccatctcaaaaaagaaaaaaaaa

SEQ ID NO: 4409 - DNA, 190 bp, Homo sapiens
  source 1..190: mol_type = other DNA
aagggttggcaaactaggactgtttgccaaattcaggctgcctcctatttttagagtcttcctgaaacacagctacacccgtattatccatggctgctttcctgtcacagtgagtaagtagctgggactgagaaggcatggcctccaaagtctaaaatatttactctctagcactttgtagaaaaacctt

SEQ ID NO: 4410 - DNA, 339 bp, Homo sapiens
  source 1..339: mol_type = other DNA
gccaggcgctgtggctcccgcctgagatcccagcacgttgggaggctgaggcaagaggattgcttgaactcaggactttgaggctgcagtgagctatgactgcaccactgcactccagcctgggtgacagagcaaaactctgcgtcaaaagaaaaaccaaggctgggcacagtagctcatccctgtagttccagctactcgggaggctgagacaggagaactgcttaaacccaggaggcagaggttgcagtgagccaagatcaggccaatgcattccagcctggcccacagagcaagactctgtctcaaaataaattaataaataaataaaaataaaaa

SEQ ID NO: 4411 - DNA, 386 bp, Homo sapiens
  source 1..386: mol_type = other DNA
tgatatggttcagctctgtatccccaaccaaatctcatgtccagttgcaattcccagtgttgagggagggacctggtgggagatgattggctcatggcggctgacgtcccccttgctggtctcgtgatagtgagtgagcgctcatgggatctggttgtttagaagcatgcagcacctcctgcttcactctctctgtctctcctgctccaccatggccagaaacgtgcctgcttccccttcgccttctgccgtgattgtcagtttcttgagggctccccagccatgcttcctgtacagcctgcaaaactgtgagtcaattaaacctcttttcttcataaattccccagtttccagtagttctttatagcagtgtgaaaacagactaa

SEQ ID NO: 4412 - DNA, 339 bp, Homo sapiens
  source 1..339: mol_type = other DNA
gccaggcgctgtggctcccgcctgagatcccagcacgttgggaggctgaggcaagaggattgcttgaactcaggactttgaggctgcagtgagctatgactgcaccactgcactccaacctgggtgacagagcaaaactctgcgtcaaaagaaaaaccaaggctgggcacagtagctcatccctgtagttccagctactcgggaggctgagacaggagaactgcttaaacccaggaggcagaggttgcagtgagccaagatcaggccaatgcattccagcctggcccacagagcaagactctgtctcaaaataaattaataaataaataaaaataaaaa

SEQ ID NO: 4413 - DNA, 386 bp, Homo sapiens
  source 1..386: mol_type = other DNA
tgatatggttcagctctgtatccccaaccaaatctcatgtccaattgcaattcccagtgttgagggagggacctggtgggagatgattggctcatggcggctgacgtcccccttgctggtctcgtgatagtgagtgagcgctcatgggatctggttgtttagaagcatgcagcacctcctgcttcactctctctgtctctcctgctccaccatggccagaaacgtgcctgcttccccttcgccttctgccgtgattgtcagtttcttgagggctccccagccatgcttcctgtacagcctgcaaaactgtgagtcaattaaacctcttttcttcataaattccccagtttccagtagttctttatagcagtgtgaaaacagactaa

SEQ ID NO: 4414 - DNA, 339 bp, Homo sapiens; identical to SEQ ID NO: 4410
  source 1..339: mol_type = other DNA

SEQ ID NO: 4415 - DNA, 386 bp, Homo sapiens; identical to SEQ ID NO: 4413
  source 1..386: mol_type = other DNA

SEQ ID NO: 4416 - DNA, 332 bp, Homo sapiens
  source 1..332: mol_type = other DNA
gccaggcgctgtggctcccgcctgagatcccagcacgttgggaggctgaggcaagaggattgcttgaactcaggactttgaggctgcagtgagctatgactgcaccactgcactccagcctgggtgacagagcaaaactctgcgtcaaaagaaaaaccaaggctgggcacagtagctcatccctgtagttccagctactcgggaggctgagacaggagaactgcttaaacccaggaggcagaggttgcagtgagccaagatcaggccaatgcattccagcctggcccacagagcaagactctgtctcaaaataaattaataaataaataaaa

SEQ ID NO: 4417 - DNA, 382 bp, Homo sapiens
  source 1..382: mol_type = other DNA
tgatatggttcagctctgtatccccaaccaaatctcatgtccaattgcaattcccagtgttgagggagggacctggtgggagatgattggctcatggcggctgacgtcccccttgctggtctcgtgatagtgagcgctcatgggatctggttgtttagaagcatgcagcacctcctgcttcactctctctgtctctcctgctccaccatggccagaaacgtgcctgcttccccttcgccttctgccgtgattgtcagtttcttgagggctccccagccatgcttcctgtacagcctgcaaaactgtgagtcaattaaacctcttttcttcataaattccccagtttccagtagttctttatagcagtgtgaaaacagactaa

SEQ ID NO: 4418 - DNA, 299 bp, Homo sapiens
  source 1..299: mol_type = other DNA
gaccaggtgcggtggctcacacctataatcccatcactttgggaggccaaggcaagtggatcatgaggtcaggagttcacgaccagcctggccaacatggtgaaatcccatttctactaaaaatacaaaaattagctgggcgtggtggcaggcgcctgtaatcctagctacttgggaggctgaggcaggagaatcgctggaacccaggagacagaggttgcagtgagctgagattgcaccactgcagtctagcctgggtgacacagcaagactccatctcaaaaaaaaaaagaaaaaaa

SEQ ID NO: 4419 - DNA, 131 bp, Homo sapiens
  source 1..131: mol_type = other DNA
gccaggcacagtgcattacgcctgtaattccagagctttggggggccaaggcgggcggactgcttgagctccggagttccagaccagcttgggcaacatagcgaaatccccgtctctacaaaaaaataaaa

SEQ ID NO: 4420 - DNA, 134 bp, Homo sapiens
  source 1..134: mol_type = other DNA
gctggggttggtggttcacgcctgtaagcccaacactttgggaggctgaggtgggaggatcctttgagcccaggagtttgagaccagcttgggcaacatagtgagaccctgtctctaccaaaaaaaaaaaaaaa

SEQ ID NO: 4421 - DNA, 349 bp, Homo sapiens
  source 1..349: mol_type = other DNA
aataaaaaaaattttaaggtatgttgagtaagaatctatagagcaatgaaaatgcaagagcaatagctatgggcaccaaatggtcaatcttcttatcataatgttgagtggaagaagccaggtccaccagacacatgctgctcatttatgcaaagtttggacacaggcaaaacaaaactagtttgatcgtgatgggaaacattagagaaatgcaaagacatgaccatcataattgtcaggagaaggcattggttaggattgggaagcggcaagcagaagcatttagggattggctggcaatgttttacttctcggctgagtgagggttgcatcggtgtttatttgataa

SEQ ID NO: 4422 - DNA, 344 bp, Homo sapiens
  source 1..344: mol_type = other DNA
gcttggtgcggtggctcatacgtgtaatcccaggcctttgggaggccaaggtgggaggatcacttgagctcaggagttccagaccattccaaagcaaaaacaaaaggattttgagatcagtgtgggcaacttagcaaaacaccatctcttaaaaaaaaaaaaaaattagccaagcttggtggtgtaagcctgtagtcccagctacttgagaggctgaggtgggaggattgtttgaacccaggaggttgaggctacagtgagctgtgattgtgccactgcactccaggttgggtaatgcagcgagactgcgtctcaaaaaataaataaaataaaaaataaataaa

SEQ ID NO: 4423 - DNA, 144 bp, Homo sapiens
  source 1..144: mol_type = other DNA
taatcccagctgctcagaaggctgaagcaggagaatcgcttgaacccaggaggcagaggttgcggtgagccgagatcgcgccagggcactccatccagcctgggaaacaagagcaaaactctctcaaaaaaaaaaaaaaaaaaa

SEQ ID NO: 4424 - DNA, 982 bp, Homo sapiens
  source 1..982: mol_type = other DNA
tgtagggaaaagaaagagagatcagactgttactgtgtctgtgtagaaagggaagacataagaaattccattttgacctgtaccttgaacaattggttggctgagatgctgttaatttgtgactttgccccaaatttgagctcacaaaaacatgtgttgtatggaatcaaggtttaaaggatctagggctgtgcaggacatgccttgttaataaaacgtttacaagcagtatgcttggtaaaagtcttcgccgttctctagtctcaataaaccagaggcacaatgtactgtgaaaagctgcagggacctctgccctggaaagccaggtattgtccaaggttctccccatgtgatagtctgaaatatagcctcatgggatgagaggctgtgccccagcccgacacccgtaaagggtctgtgctgaggtggattagtaaaagaggaaagccttgcagttgagatagaggaagggcactgtctcctgcctgcccctgggaactgaatgtctcggtataaaacccgattgtacatttgttcaattctgagataggagaaaaaccaccctatggcgggaggcgagacatgttggcagcaatgctgccttgttatgctttactccacagatgtttgggcggagggaaacataaatctggcctacgtgcacatccaggcatagtacctccctttgaacttaattatgacacagattcctttgctcacaggtttttttgctgaccttctccttattatcaccctgctctcctaccgcattccttgtgctgagataatgaaaataataatcaataaaaactgagggaactcggagaccagtgctggtgcaggtccttggtatgctaagtgccagtctcctgggcccactgttgtttctctatactttgtctctgtgtcttatttcttttctcagtctcttgtcccacctgatgagatatcccacagatgtggaggggcaggccaccccttc

SEQ ID NO: 4425 - DNA, 195 bp, Homo sapiens
  source 1..195: mol_type = other DNA
gcagttgagggaatgggttgtcaagccagactgatgggtcaggagccccctctactgtttaccagcagtgggagcctgggcaagtgattcaatctcaagccccactggcatctctgtaaaatagtaggtgtgaggattcaatgagccaatatatccaagatacttacgtgccacaatttaataaatgttagctat

SEQ ID NO: 4426 - DNA, 86 bp, Homo sapiens
  source 1..86: mol_type = other DNA
gcttagacctggagtcatctgttttggtcttagttctgacactttaatgggcttgggaccctggagcaaaagttctcctctgtgag

SEQ ID NO: 4427 - DNA, 155 bp, Homo sapiens
  source 1..155: mol_type = other DNA
ccaggtgcagtggctcacgcctgagatcctagcacgttgggaggctgaggcaagaggattgcttgaactcaggactttgaggctgcagtgagctatgactgcaccactgcactccagcctgggtgacacagcaaaaccctgtgtcaaaagaaaaa

SEQ ID NO: 4428 - DNA, 279 bp, Homo sapiens
  source 1..279: mol_type = other DNA
gccgggtgtggtagctcatgcctgtaatcccattactttgggaggctaagatgggtggatcacttgaggtcagttgttcgagaccaaccagaccaatatagcgaaacctcatttatactaacaatacaaaaattagccaggcatgcctgttatcccagctactcgggaggctgagacaggataattgcttgaacccaggtggaagaggttgctttgagccaagatagcgccactgcatttttttgagacgctgtgtcaaaaaaaaaaaaaaaaaaagaa

SEQ ID NO: 4429 - DNA, 220 bp, Homo sapiens
  source 1..220: mol_type = other DNA
gaccgggcatggtggctatgcctataatcccagcattttgggatgccaaggcgggtggatcacctgaggtcaggagttcaagaccagcctggccaacatggcgaaaccccgtctctaatacaaatacaaaaattagccaagcatggtggccactgtactccagccttggcgacagagcaagactccgtctcaaaaaaaaaaaataaaataaaagagaaag

SEQ ID NO: 4430 - DNA, 299 bp, Homo sapiens
  source 1..299: mol_type = other DNA
ggctgggcgcagtggcttgtgcctgtaatcccaacattttgggaaaccaattcaggtggatcattagaggtcaggggttcaagaccatcctggccaacatggtgacatcccatctctactaaaaatacaataagttagctgggtttggtgttgggtgcctgtaatcccagctactcgagaggctgaggcaggataatcgcttgaacctgggaggaggaggtggcagtgagctgagatcgtgccattgcactccagcgtgggcaacaagagtgaaacgtcgtctcaaaaaataaaacaaa

SEQ ID NO: 4431 - DNA, 126 bp, Homo sapiens; identical to SEQ ID NO: 3862
  source 1..126: mol_type = other DNA

SEQ ID NO: 4432 - DNA, 383 bp, Homo sapiens
  source 1..383: mol_type = other DNA
tgacatggttcagctctgtatccacacccaaatctcatgtcaaattgtaattcccagtgttgtgggagggacctggtgggaggtgattggctcatgggggccgacttcccccttgctgttctcgtgatattgagtgagcgcttgtgggatctggttgtttaaaagcgtgcagccctcccacttcactctctctgtctctcctgctccaacatggccagacgtgcctgcttccccttcgccttctgccgtgattgtcagtttcctgaggcctccccagccatgcttcctgtacagcctgcagaactgtgagtcaattaaacctcttttcttcataaattacccagtttctcatagttctttatagcagtgtgaaaacagactaa

SEQ ID NO: 4433 - DNA, 142 bp, Homo sapiens
  source 1..142: mol_type = other DNA
gtctcgctttctgcatctgtaagctgggccagtacaccgtactccacagggctgccgtgagtacagatgagactgaaacaggggcattgatcaaagtacccaacacagagcctggcacatagaggtgttcaataagtaactt

SEQ ID NO: 4434 - DNA, 85 bp, Homo sapiens
  source 1..85: mol_type = other DNA
tgtaatcccagcgctttgggaggccgagacgggaggatcgcttgaggccaggagttcaagactagcctgggcaacatagcgagac

SEQ ID NO: 4435 - DNA, 303 bp, Homo sapiens
  source 1..303: mol_type = other DNA
gccgggcacagtggctcatgcctgtaatcccagcactttgggagaccgaggtgggcgcatcacgaggtcaagaaatgagaccaccctcgccaacatggtgaaaccccatctctcctaaaaatacaaaaaattacctgggcgtggtggcgcgcgcctgtagtcccagctactcgaggtgctgaggcaggagaatcgcttgaacccgggaggcggaggttgcagtgaggagagatcgcgccattgcattccagcctggcgatatagccagactccgtctcaaaaaaaacaaaacaaaacaaaaaa

SEQ ID NO: 4436 - DNA, 385 bp, Homo sapiens
  source 1..385: mol_type = other DNA
ttaatctctccccacttcctctgctcattcatccatacctactgcctcctcactgctatgtcctctctcctgacccggcacttgctctttcccagtcctagaaggctcttctcttccagttcccactgcccttttccctttcctggctaatcccatactcatccttcttgtctcaacctagtggtccttaaggaagctttgctgacccccgacaccgagcgggcgtccctcctgtgtagcactgtgttagccctaccaagtcaaggctctccttgcctgtttcctgccggaaccatgtctttttacttcactcctgtctcctcagcattccagcacagtgctgggtacataacaggtgctcaagacaagtttgtggaatgactaa

SEQ ID NO: 4437 - DNA, 383 bp, Homo sapiens
  source 1..383: mol_type = other DNA
gacatggttcagctctgtatccacacccaaatctcatgtcaaattgtaattcccagtgttgtgggagggacctggtgggaggtgattggctcatgggggccgacttcccccttgctgttctcgtgatattgagtgagcgcttgtgggatctggttgtttaaaagcatgcagccctcccacttcactctctctgtctctcctgctccaacatggccagacgtgcctgcttccccttcgccttctgccgtgattgtcagtttcctgaggcctccccagccatgcttcctgtacagcctgcagaactgtgagtcaattaaacctcttttcttcataaattacccagtttctcatagttctttatagcagtgtgaaaacagactaat

SEQ ID NO: 4438 - DNA, 299 bp, Homo sapiens
  source 1..299: mol_type = other DNA
gctgggcgcagtggcttgtgcctgtaatcccaacattttgggaaaccaattcaggtggatcattagaggtcaggggttcaagaccatcctggccaacatggtgacatcccatctctactaaaaatacaataagttagctgggtttggtgttgggtgcctgtaatcccagctactcgagaggctgaggcaggataatcgcttgaacctgggaggaggaggtggcagtgagctgagatcgtgccattgcactccagcgtgggcaacaagagtgaaacgtcgtctcaaaaaataaaacaaaa

SEQ ID NO: 4439 - DNA, 339 bp, Homo sapiens
  source 1..339: mol_type = other DNA
ggccaggtgcagtggctcacgcctgagatcctagcacgttgggaggctgaggcaagaggattgcttgaactcaggactttgaggctgcagtgagctatgactacaccactgcactccagcctgggtgacagagcaaaaccctgtctcaaaagaaaaaccaaggctgggcacagtagctcatgcatgtaatcccagctactcgggaggctgagacaggagaatcgcttaaacccgggaggcagaggttgcagcgagccaagatcaggccactgcattccagcctggcccacagagcaagactctgtctcaaaataaattaataaataaataaaaataaaa

SEQ ID NO: 4440 - DNA, 308 bp, Homo sapiens
  source 1..308: mol_type = other DNA
ggcagggtgcagtggctcacacctgtaatcccagcactttgggaggccaggcaggcagatcacttgaggccaggagttggagaccagcctggccaacatggtgaaaccctgtctcttctagaagcacaaaaatgagctgggcgttctggtgggcacctgtaatcccagctacttgggaggcttaggcaggagaatcactggaacccaggaggcggaggttccagtgagccaagatcgcaccactacactccagcctaggccacaaagcaagactgtttctcaacaacaacaacaaaaaaaaaaaaaaa

SEQ ID NO: 4441 - DNA, 299 bp, Homo sapiens
  source 1..299: mol_type = other DNA
ggccgggtgtggtagctcatgcctgtaatcccattactttgggaggctgagatgggtggatcacttgaggtcagttgttcgagaccaaccagaccaatatagcgaaacctcatttatactaacaatacaaaaattagccaggcatgcctgttatcccagctactcgggaggctgagacaggataatcgcttgaacccaggtggaagaggatgctttgagccaagatagcgccactgcattccattctgggtgagagagtgagacgctctctcaaaaaaaaaaaaaaaaaaaaaaaaaga

SEQ ID NO: 4442 - DNA, 155 bp, Homo sapiens
  source 1..155: mol_type = other DNA
gccaggtgcagtggctcacgcctgagatcctagcacgctgggaggctgaggcaagaggattgcttgaactcaggactttgagactgcagtgagctatgactgcaccactgcactccagcctgggtgacagagcaaaaccctgtgtcaaaagaaaa

SEQ ID NO: 4443 - DNA, 324 bp, Homo sapiens
  source 1..324: mol_type = other DNA
ggctgggcatagtggctcatgcctgtaatcccagcactttgggaggccaaggtgggcagatcacctgaggtcaggagttcgagaccagactgggcaacatggtgaaaccctgtctctactaaaaatacacacacaaaataaaattaaccaggcgtggtggtagtagcctgtaatcccagctactcaggaggctgaggcaggagaatcgcttgaaccaggaaggcagagtttgcagtgagccgagatcgcaccactgcattccagcctggttgacagagcaagactgcgtctcaaaaataaataaataaatacataaataaataa

SEQ ID NO: 4444 - DNA, 1189 bp, Homo sapiens
  source 1..1189: mol_type = other DNA
gtaaattggtactggtagagtggggtgctgctataaggatacccgaaaatgtggaagtgactttggaaatgggtaaccggcagaggttggaacactgtggagggcttggaagaaaacaggaaaatgtgggaaagtgtggagtttcctagagacttgctgaatggctttgaccaaaatgctgatagtgatagggacaataaagttcaggctgaggtggtctcagatagagatgaggaacttgttgggaactggagcaaaggtgactcttgtcatgatttaataaagagactggtggcattttgccccttccccagagatctttggaactttgaacttgagagagatgacttaaggtatctagcagaagaaatttctaagtggcaaaatgttcaagagggagcagggcataaaagtttggaaaatttgcagcccaataactaaataggaaagaaaaaccattttctggggagaaattcaagctggttgcagaaatttacacaagtaatgaggagagaaatattaatcaccaagataatgtggaaaatatctccagggcatgtcagagacctttgtggcagcccctcccatgacagatccagaagtctaggaggaaaaaaatggctttacgggcccagggtccccccgctgtgtgcagcctagcaacttggtgccctgcattccagctgctgcagccatggctaaaaggggccaaggtatagcttgggccatggctttagagggtgcaagccccaagctttggcagcttctacttgttgttgagccttctggtacacagaagtcaagaattgagatttggaccccaagactatgggagcccacctcttgcatcagcatgacctgaatgtgaggcatgaaatcaaaggagattattttgggtctttaagatttaataactgccttgttggatttcagacttgcatgagacctgtagcccctttgttttggccactttttcccatttggaacaggtgtatttacccaatggctgaacctccactgtatctaggaagtaactaacttgcttttgattttgcaggcttttaggtggaaaagacttgcccttgtctcagatgagactttggacttcaactttcaggttaatgctggaatgagctaagacttttggagactgttggaaaggcatgaaatgtgaggacatgagatttgg

SEQ ID NO: 4445 - DNA, 4360 bp, Homo sapiens
  source 1..4360: mol_type = other DNA
gtattaacagcagaattaaccaagctgaggaaagactctcagagctcaaagactggttctccaaaatacagttagacaaaaataaagaaaaaattaaaaaatgaacaaaacattcaagagatatgaggttatataaagagaacacattttcaactcattggcatccctgaaagagaggggagaaagcaggcaacttggaaatcatatttcagaatatcattcaccaaaactttttcagcttcacaagagaagccgacattcaaattcaagagatgcaaataacccctgcaagatactatatcagatgaccatcccaaagactcataattttcagattcttcaaggttgacatgaaagaaaatatattaaaggcagctagaaagaaaggacaggtcacctacaaagggaaactcatcagattaacagtgactgtttcagcagaaacactccaatctgaaatagattgggggcctatattctgcatttttaaagaaaagaaactccaaccaataatttcctacccagccaaactaagctttataagcaaaggagaaataagacccttttcagacaaggaaatattaagggaacctgttacaaccagacctgccttacaaaacgtacttgagggagttctaaacatggaaagcaaagaccattaccagccaccacaaaaacaaacttaagtacataggttatggacactataaaacaaccacataataaagtctgcataataaccagctaacaacacaaagataggatccaattcccttcccccacccccccgtgaatattaaccttgaaagtaatgggctatgtgccccagtcaaaaggcacagattggcaagttagataaagaagctagactgcaagactcaaatgtatgctgtcttcaagaaacccatcccacaaatagtgacacccatagactcaaagtaaagggatgaagaaaaatctaccaagcaaacacaaaacagaaaaaagcagggactcctattcttatttccaacaaaacagactttaaaccagtgatcatcaaaacagacacagaagggcattgcataataataaagagttcaattcaatgagaagacctaactattgtaaatatatacccacccaatgtaggagtacccagatgcataaagcaagttctgaaacacctacaaaaagatgtagataaccacacaataatagtgggatactacaacatgacactgacagtattaggcagatcattgagacatacaactaacaaaaacattcaggacttgaactcaacacttgactaaatgggcctaatagatatctacagaactctgcatccaaaaataacagaatataaattattctcatctgcacatagcacatactctaaagtcaaccacatgattggccacaaaacaaccctcagcaaatcaaaaaaaactgaaatcataccaaacatactcttagactacagtgcaataaacaatcaacactaagaaaattgcttacaactatgcaattacttggaattaaacaacctgctcctgaatgacttttgggtgaaccatgaaattaaggcaaacatcaagtaattctttgaaactaaactctagtatcccagagataccagaatctctgggacacagctaaagcagtggtaagagggaattttatagtgatgcccacatcaaaaagttaaaaggatctctaattcataacctaaggtcacacctggaaaaattagaaaaacaagagcaaaccaacgccaaagctagcagaagacaagaaataaccaaaatcagagctgaactgaaggaaattgagagatgaagagcaaaaaagataaatccaaattttaatttttttaaagaataaaaagattgataaactcttagctagactaataaagaaaaaaatagggaggacccaaatagacgcaattagaaaagacaacgaagacattaccactgaccccacaaaaatacaaaataccctcagagacaactacaaatacctatgcacacaaagtagaaaacttagaagaaatggataaattcctagaaacataagctcccaaggttgaacaaggaagaaactgaatccctaaacagatcaataatgagttccaaaattgaatcagttatgaaaagcctatcaattagaaaaatacaaggaccagatggatccacagcctaattctaccaaatgtataaagtagagctagtaccacttctactaaaactactccaaaaagttgaggaggagggactctccctaacgcattgtatgaggccagcatcatcctaatactaaaatctggctgagatgcaacaaaaaaagaaaatgttgggccaatatccctgatgaacatagatgctaaaatcctcaacaaaaatactagcaaatcaaatccagcagaacatcaaaaagctaatccacagcaatcaggtaggctttattcctgggatgcaagattagttcaacgtatacaaaaccaataaatatgattcatctcctaaacagaactaaaataaaccacatgaacatctcaacagatgcagaaatggctttcaataaaattcagcatcctttcatgttaaaaatcctcaacaagcaaggcattgaagaaacatacatcaaaataacaagagccatctatgacaaacccacagccaacatcatactgaatgggcaaatgctggaagcattgcccttgagaaacagaacaagacaagggtgaccactctcagcactcctattcaacatagtactggacatcctagccagaacagtcaggcaagagaaagaaataaaaggtacccaaacaggaaaagaggaagtcacactatctctatctgcaatctgtttctatacctagaaaaccccatagtttctgcctagcagctcctagatccaataaaaaacttcatcaaagtttgaagatacaaaatcagtgtacaaaaattagtagcatttctatacaccaataacgttcaagctaagatccaaatcaagaacacaatcctattcacaatagccaaaaaaggaataaaatacctaggaatacagttaatgacagaggtgaaacataaacatctctacaagaactacaaaacgttgctcaaaagaaatcagagatgacacaaacaaatgtaaaaacattccatgctcatgaataggaagaatcaaaattgttaaaatggccatagtacccacagcaatttagattgaatgctattcctcttaaaacaccaattacattcttcacagaattataaaaaactgtttcaaaattcatatggaaacataaaagagctcaaatatccaaggtgatcctaagcaaaaatagaaaagctggaggcatcacattacctgacttcaaaccataccacaaggccacagtaatcaaaacagcatggtactggtacaaaaacagacacatacaccaactgaacagaatagagagcccagaaataatgccagacagctacaaccacccaatttttgacaaagttaacaaaaaacaagcgatgggagcaggactccctattccataaatggtgctgggataacctgctagatatatgcagaagactgaaactaaacccctccctgacaccatatacaaaaatcaattcaagatggattaaagacctaaatgtaaaacctaaaactaaagaccttagaaggtaacctacaaattaccattctggacataggtcctgggaaaattttcttcccaaagatgccaacagcaatggcaacaaaaacaaaaattgacaaacgggacccaattaaagtaaagagcttccgcacagcaaaagaaactatcaacagagtaaacagacaacttccacaaggggagaaaatatttgcaaattatgatttgatgaagataggttcttcatagattctaatatccagaatctataaggaacttaaattaacaagcaaaaaacaaccccattgaaaagtgggctaaaaacctgaacagacacttttcaaaagaagacatacatgtggccaataagcatatggaaacaagctcaacatcactaataattagagaaatcaaaaccacaatgagataccatctcatgccagtcagaatagctattattaaaaaggcaaaaaacagcagatgctagtggagttgcagagaatggggaatgcttatacactgctggtgggaatgtaaattagttcagccactgaggaacacagtgtgatgacttctcaaataacttaaaacagaattaccatttgacccagcaatcccattattgtgtatatacccaaaggaatataaatcattctgtcataaagacacatgaatgcaaatgttcatcacacactattttcataatag

SEQ ID NO: 4446 - DNA, 327 bp, Homo sapiens
  source 1..327: mol_type = other DNA
ggccaggcgctgtggctcccgcctgagatcccagcacgttgggaggctgaggcaagaggattgcttgaactcaggactttgaggctgcagtgagctatgactgcaccactgcactccagcctgggtgacagagcaaaactctgcgtcaaaagaaaaaccaaggctgggcacagtagctcatccctgtagttccagctactcgggaggctgagacaggagaactgcttaaacccaggaggcagaggttgcagtgagccaagatcaggccaatgcattccagcctggcccacagagcaagactctgtctcaaaataaattaataaataa

SEQ ID NO: 4447 - DNA, 297 bp, Homo sapiens
  source 1..297: mol_type = other DNA
ggccgggtgtggtagctcatgcctgtaatcccattactttgggaggctgagatgggtggatcacttgaggtcagttgttcgagaccaaccagaccaatatagcgaaacctcatttatactaacaatacaaaaattagccaggcatgcctgttatcccagctactcgggaggctgagacaggataatcgcttgaacccaggtggaagaggttgctttgagccaagatagcgccactgcattccattctgggtgagagagtgagacgctgtctcaaaaaaaaaaaaaaaaaaaaaaaga

SEQ ID NO: 4448 - DNA, 303 bp, Homo sapiens
  source 1..303: mol_type = other DNA
ggctgggcgcagtggttcacgcctgtaatcccagcactttgggaggccgaggcaggtgatcacctgaggtcaggagttcaagaccagcctgacaaacatggagaatccccaactctactaaaaatataaaattaaccgggtgtggtggtgcatgcctataatcccagctactcgggaggctgaggcaggagaatcacttgaacccaggaggcagaggttgcagcaagccaagatcgcaccattgcactccagcccaggcgacagcccaagactccgtctcaaaaaaaaaaaaaaaaaaaaaaa

SEQ ID NO: 4449 - DNA, 307 bp, Homo sapiens
  source 1..307: mol_type = other DNA
ggctgggcgcaggggctcatgcctgtaatctcagcactttgggagcctgaggccggtggatcacttgaggtcaggagtttgagaccaccctggccaacacggtgaaaccccatctctactgaaaacacataattagctgggcgtgctggcagacacacgcaatcccagctattcaggaggctgaggcaggagaatcacttgaaccggggaagtggaggttgcagtgacccaagatcgtgccattgcactccagcttgggcagcaagagtaaaactccaactcaaaaaaaaaaaaaaaaaaaaaaaaa

SEQ ID NO: 4450 - DNA, 159 bp, Homo sapiens
  source 1..159: mol_type = other DNA
gggcgcagtggctcatgcctgttgtcccagcactttgggaggccaaggcagaaggattgcttgagcctgggaggtcgaggctgcagtaagccatgatggcaccaatgcattccagcctgggtaacagagtgtgacttcatctcaaaaagaaaaacaaaa

SEQ ID NO: 4451 - DNA, 182 bp, Homo sapiens
  source 1..182: mol_type = other DNA
tgagatgtgtgtaatccaggagtgtgcaaaacaatctgtaagggttcagaaaacatactgcttctatatatagttacctttgtcttaacttgaaaatttcaaattgtgtaggagttacaatgtgtgtaattgttattatagtactggatccaaataatttataaataaataaatatagacat

SEQ ID NO: 4452 - DNA, 232 bp, Homo sapiens
  source 1..232: mol_type = other DNA
gtagtacagggtttaagtctggcctgtgaagtcaaactgcccagcttctagtccttgatcgtgctccctgaccaagcaggtcacctgaaatgctctaagccttggttttcttattagcaaaatgtgagtgagtagagtacctacctcatagttgttgtgaggtttcaatgggctcaataacttagtgtgccaggcacattgttaataagaagtaaatgctcttgttatcatt

SEQ ID NO: 4453 - DNA, 373 bp, Homo sapiens
  source 1..373: mol_type = other DNA
gtgatggatagttttatgtgtcaagttggctagactgtagtcccaattattcaatgaaaccctaatctcgatgttgcttggtaaatacattttgtggatatagttaacatctacaattaactgactttaagtaaaggagatcatcgttgatactttggccaggtctcatccaatcagttgaaaggccttaagaataaaattgaggtttccctgaggaagaagaaattttgcctcaaaactgaagcatcagttcctgtccaagagtttccagtctgcttccctgcccttcagattttaaatttgccagccctcacgatttgtgtgagccaatacctactctggttttgtttctctggagagcactagctataca

SEQ ID NO: 4454 - DNA, 494 bp, Homo sapiens
  source 1..494: mol_type = other DNA
caggtcagaggtaacggatcaaaaggtaaggagtacataaagtgttccaagttgacaaattggacataaataaatcactaggaccagatggcattcatccaagagttttgaacggactcaaggatgaaattgtggagctgttggccaaatgtggaaactgttgttgcaaacaatcaccttgtcagagtactgggagattgctgatgggattcccatctgtaagaaggactctagagaaaaccctaggaacaagatatagatcagcaagactggctttcctggcataaaaagatgaaaagaataaaaaaacagggtcagtgccactgaacacctttatgtaactcacttactggggtaaaagctgcatagtttgggtaagaagaaatcatacaaccactatggccttgttgagttctctgaggtggttaacaattattgtgtggccaaattgtagacataatttacttttccttttaagggactttgaaaagatt

SEQ ID NO: 4455 - DNA, 297 bp, Homo sapiens
  source 1..297: mol_type = other DNA
gtcgggcatgctggctcacgcctataatcccagcactttgggaggctaggcaggaggatcacttgatcccaggagttcaagatcagcctgggaaacatggtgagaccccatatctaccaaataaaaaaattagtggtggtgaacacctgtagtcccagatactcaggaggctgaggtgggaggattgattgaggctgggagattgaggctgcagtgggccgtgatagtgccactgcactccagcctgggtgatcaagtgagaccctggtctcaaaacaacaaaaacataaacaaaaa

SEQ ID NO: 4456 - DNA, 60 bp, Homo sapiens
  source 1..60: mol_type = other DNA
tggataggtatctttatatctcctacatacaatatcaaccctaccacctggttgtcaagt

SEQ ID NO: 4457 - DNA, 307 bp, Homo sapiens
  source 1..307: mol_type = other DNA
tgggagccatgacttatgcctgtaaccccagtattttggaaggcagatggggaggatcacttgcagccagctaagaccagcctaaggaacacggcaagatcacacctctacacaaattttacaaacatagccaggcatggtggtgcgaacctgtagtcctagctacttggtaggttgaggtaggaggatagcttgatctcaggagttcaaggctgcagtgagctatgatcatgccaccatactccagcctgggtgacagagcaagactctgtctctgaaaaaaaaaaaaaaaaaaaaaaaaaaaaaa

SEQ ID NO: 4458 - DNA, 126 bp, Homo sapiens
  source 1..126: mol_type = other DNA
cgggaggctgaggcaggagaatcgcttgaacctgggaggtagaggttgcagtgagccaagattgcgccactgcactccagcctggagacagagcaagactccatctcaaaaaaaaaaaaaaaaaaa

SEQ ID NO: 4459 - DNA, 742 bp, Homo sapiens
  source 1..742: mol_type = other DNA
ggaaagaagtgagatggctgcatttccactacatggtaggtcagggatgcctgaggttttccttgcttttcagaaaaaacaagtacaagttctcttgaagggatgctgcccaggagggctgcctgttgggttaaggggacagcctcagaaagaccctggaggtataatgcagtgggaaggagctgaattataagtggtcaggtttagtctattcccctgtcagaaaatgctgcaataggcagagtgaggtgtgcgatggtgatgataaaggtggagtgtctttgaagaacatacaaatatcattcataacagaaaagcagcatctggatgcctgacataacaaaggacacacatggggagattaaggagaaatggaggaagaagcttttgcttctttattcttgttcctcctcattccttgccctgatctcaagaggagacagaagaaggtgaggttgggaggagctagagcaaatggcaaagaaacagaccacactaacctcccttttcactggtttccagagttcaaaagatgagagaacctttaaattggatgcaaggttaaagtttgtcttcggaacagactacatttttgtttcatacctaaaattgagactattccgatacatgaaagaaacaaatagttatgaggtgggctagcgatgctgtctagaggtagggcaatggggtctgacagggtacactttaaggcaggagtaggtgagagaaaaataattgtttt

SEQ ID NO: 4460 - DNA, 191 bp, Homo sapiens
  source 1..191: mol_type = other DNA
cagttttctttcctggtgtttcctcttctctctgcctagtaaaggatgttataaaatcgcagttcaatgtttttttctcttcttgtattttccactctgctggttatggccaatgagtcaagattcaaagtgttcccatatatatctctgcagctcaaactctccagaacttgggcttgtatttccagtta

SEQ ID NO: 4461 - DNA, 292 bp, Homo sapiens
  source 1..292: mol_type = other DNA
ttgttgatttaaaatgacaacagtttcaattcccagaaagtgaaaggaaacaaaggaataatattataggcttaatttttatcagtgaacttgtaggtgaagaaaagatttggggaaggaaatgaacatattatattgcaaaatagtaaggaacaatcagatgtgttttctagtctctggaaaagcatgtttcaagaaattcaatgaaaagttcatcatgcttgcttagattgttgagaagcaaaaacactgatgaacatttggaagcaatgagaatgtaattctaatcata

SEQ ID NO: 4462 - DNA, 349 bp, Homo sapiens
  source 1..349: mol_type = other DNA
tggtattttaatagatcaagaggagcaagcagatttttgagacagttgtctcctactttctctatcacagggagtaattttaaaagaaaaatggagggtaagtttctttaagagaaaattgtagtttaaaacaggtcatgggataattagaaataatttaatttctttagaggattttaatctttcaactgcttgcaattagatcctaaggcaataaaagaataaggagatttggaaaaccattgtctgtaatctctgaagaaaagtggacattaggggagtcagttgaaaagcaaagctatcaccattttctaaagaggaaaaaggtgaacctcacaaactatagacc

SEQ ID NO: 4463 - DNA, 59 bp, Homo sapiens
  source 1..59: mol_type = other DNA
gctagcataggttcacaaagaatgagtcaaatcaaacaacatgcattttttatttataa

SEQ ID NO: 4464 - DNA, 785 bp, Homo sapiens
  source 1..785: mol_type = other DNA
ggagaaaagagacagagcagagaaaaagaatcaaagaaatactaacagagaactttccagatttgatgaaaaacaatctacagattcatgaagcttaactaaccacaactaggaaaacacaaagagagccataaaaagaagaaaatgggtcatcacatgtaggggaccactaataactttaacagctgactttaaaatcagaagcgatggggaccataaggcctgatgcattcaaagtgctgaaagaaaaaaaaccaaaaaactgtcaaccaggtattctatatccagcaaaactagtcttccaaagtgaaggtgaaaaaatggcattcccagataaaacttgagagaatttctccctgtcagactgtcttataagaaatattaaagcaaatcttcaggctgaaaggaagtaacactgtatattagtttgtatccataggaagaattgaagaatgctgggaatagtaaatatgtggtaaatataaaggagttttcaacattgtttggttggatttatagcaggtacatgaaatatatatatgataatagcacaaaggagttaggaaaaggacataaattatagtttctatttgactgatattaagtattattgtgatatagattgtgataaattaagacacattataatccctagagcagttgctaagttactaagaagataactccaaaaatgtaaaagaaaaaaaacaaacaccagaggaattaaaatggcatactaaaaaatatcacaaagcaggaaaggaagaataggtaaacaaaaaaag

SEQ ID NO: 4465 - DNA, 4192 bp, Homo sapiens
  source 1..4192: mol_type = other DNA
ataccaccacaaaaaaatcaccaaaaggaagacaagaagggtagaaagaaggaaggaagagaaaaccagaaaacaaataataaaatggcaggagtaagttcctacttatccataataaaatggaatgtaaatggactaaactctccaaacaaaagacaacgagtggctgaatggatgaaaaaaaaaaaagagacccaatgatctattgcctacaagaaacacacttcacctataaagataaacatagacttaaactaaaaggatggaaagatattccatgccagtggaaaccaaaaaagagcaggagttgctatgcttatgtcaggcaaaatagatttggagacaaaaactgtaagaaaagacagggtcattgtataatgataaaagggtcaattcaacaagaggatgtaatgattgtaagtatatatgtactggagcacccaggtgtataaagcaaatattattagagctaaagaggaagatagaccccaatacaataatagctggagacttcaacaccctactttcagtattagacagatctcctagacagaaaatcagcaaggaaacattgggcttaatctgcactgtagaacaaatggacctaatagatatttacagaacatttcatccaacagcctcagaatacaaattttcctcctcagcacatggatcattctcaaagacagaccacatattaggtcacaaaacatgtcttaaaacattcagaaaaattgaaataatatcaggaatcctctctgaccacagtggaataaaactacaaatcaataacaaggggaattttggaaaccatacaagcacatggaagttaaacaatatgctcctaaatgaccaatgagtcaatgaagaaatgaagaaggaaattgaaaaacttcttgaaacaaatgataatggaagcacaacataccaaaatctatgggatacagcaaaagcagcactaagagggaaatttatagctgtaagtgcctacatcaaaaaagaagaaaaacttcaaataaataacctaacaatgcatcttaaaaagcagcaaaagcaagagcaaaccaaactgaaaattagtataagaaaagaaataataaagatcagagctgaaataaaatggatttgaaatgaagacaacactacaaaagatgactgaaattaaaagttagttttttgaaaagataaaattgacaaacctgtagccaaggtaaccaagaaaaaaaaagaatacccaaataaattagaggtgaaaaagaagactttacagccgataccacagaaattcaaaagatcattagtggctactttgaacaactatatgccaataaattggaatatctataagaaatgaataaattctcagatacatataacctaccaagacagaatcatgaagaaatccaaagcccaaatgggccaataacaagtagagattgaacccatactaaaaagtcttccagtaaagaaaagcctgggacccaatggcttcaccgctgaattctaccaaacatttaaagaacacctagtaccaatcctactaaagcttttccaaaaaatggagggagatggaatactttcaaactcattctacaagactagtattaccctgctaccaaaaccagacaaagacacatcagaaaagtaaaaacaatagggcaatttatctgatgaatatggatgcaaaaatcctcaacaaaataactagcaaaccaaattcagcaatactttaaaaagatcattcatcctgtccaagtgggatttatcccagggatgcaaagatggttcaacaaactcaaatcaatgtgatgcatcatatcaacaaaatgaagaaaagccatatgatcatttcaattgatgctgaaaaaacatttgataaagttcagcatctcttcatgtcaaaaaccctcgaaaaaactggctgtagaaggaatatacctcaacataataaaagctatatatcccacagctattattgtgctgaatagggaaaaagaaaagaaggatgttcactttcaccagtgttattcaacatagtactggaagtcttagctggagtaatcataaaagagaaagaaataaagggtatttgaattggaaaggaagaagtcaaattatccttgtttgtagatgatataatcttatatctggaaaaacccagactccatcaaaaagctattaaaactgataaattcagttaagttgcagaacacaaagtcaacatacaaaaatcagtagtgtttctatattctaaaagtgaacaatagaaaaagaaataaaaagtcatcccatttacaatagacacaaataaaattaaataccttggaattattcaaagaagtgaaagatctctacaatgaaaagtatgaaacactgatgaaagaaattgaagaggacaccaaaaaatggaaggatacttcatgttcattaatttgaagaatcaatattgttaaaatgtctattctacccaaagcaatcttagattcaatgcaattcctatcaaaataccaatgaaattcttcacagaaatgaaaaaaactaaaatttgtatggaatgacaaaagacccagaatagccaaagctgtcctaagcgaaaagaacaaaaccggaggaatgacatgacctgactttaaattctactgaagagctatagtaaccaaaacagcatggcactggcataaaaacagacccgtagaccaatggaacagaacagagaatccagaaacaaattcacacacctaaaatgagctcatttttgacaaaggtgctaagaacacacattgggaaaaagacttcaatccatggtgctggggaaactggatatgcctatgcagagaaagaaacctgactcctttttttcaccttatacaaaaataaaatcaagatggattaaagacttaaatctgagacctcaaactatgaaactactacaagaaaccattggggaaattctccaggacattggtcagggcaaacatttcttgactaataccacacaagcacaggccatcaaagcaaaaatggaaaaatgggatgacatcaagttagaaagcttctgcacagcaaacaatcaacagtgtgaagagacatcccacagaatgggagaaaatatttgcaaactacccacctaacaagggattaacaaacagaatatataaggagctcaaagaactccatattaataaacctaatagtatgatttttaaaatgggcaaaatatttgattagacatttctcaaaagaagacatagacgtggaaaacaggcatacgaaaaggtgctcagcatcattgattattagagaaatgcagatcaaaactgcaatgaggtatcatctcaccccagttaagatgacttttatccaaaagtcaggcaataacagatgctattgagaatgtggagaaatgggaaccctctgtacactgttgatggggatgtaaattagtacaaccactatggagaacagtttggaggtttctttaaaatcttgaaaatagagctaccatatgatccagcaatcctactgctgggtatatacccaaaggaaagaaaatcaggatattgaagagatatctgcactcctatgtttgttgcagcagtgttcacaatagccaagatttggaagcagcctaagtgtccgtcaacagatgaatggataaagaaaatgtggtacttatagacaaagcagtactattcagccacgaaaagaatgagatcctatcataatgacgtccagttccatccaacaacatggatgtcattacgttaagtgaaataagccaggcacagaaagacaaacattgcatgttctcagtcatttgtgggatataaaaatcaaaacaatagaactcgtggaactagaggatagaaggatggttacttacaggctggaaagtgttgggtggggagccatggggaggtgggaatggttaatgggggaaaaagttggaaagaatgagtaagacctagtatttgatagtacaacagtgggactatagtcagtaataattcattattcgtttaaaagtactaaaagggtataattgggttgttagtaacataaagaataaatgctctaggggatagatacccagtttactctcatgtgattattatgcattgcatgcctgtgccaaaatatctcatgtgtcccataaatacatatacctactatgtacccacaataattaaaa

SEQ ID NO: 4466 - DNA, 2860 bp, Homo sapiens
  source 1..2860: mol_type = other DNA
ttaaaaaaacaaacagactgaaagcaaaaagatgggaaaagataaaacagtaacaataagagagctggaatagatatgttaatatcaggcaatgtagactttaatacaataaagataactgaagagaaataggaaagtttcataataataaaaaggttagtgcaaaaggaacttaaaacaatcataaggatatatgcatctaacatctgcatttcaaaaatacattaagcaaaaaatgtaaaatgagaaattataattatatgacagtaattagagatttcagcatcccattattgagaaaccaattagagaatcagcaaggtgatagaagactttaacaatattatcaatcaacttgacctaactgacatgcatagatggaaaacacccagtcactgcagaatagcagaaagaaatcttagaaaatcccaaatatttgacaattaaggaacacttttctaataacccaaggatattttttaatattttcaattgagtgaaaatgaaaactcaacttagaatttatgtatgcagctaaagcagtgcttcaaggaaaatttatacttttaaatccacatatcagaaacagagaaaaacttctcattaattacataagtttccatcttaagaaactggaaaaagaaaagcaaatcagagcaaaaacaagcaaaggaatgagaaaataaagaataagcaaaaccaatgaaacagaaaagtactagagaaaaatcagtgtaactaaaagtttgcagagatcactaaagttgaaaaacatttagctacactgactagaaaaaaagcagacccaaattaccaacttcagaagtgaaagaggtgacattactaccaactgtacaaacttaaaaaatattatgaaacaatattatgaacaactttatgccatcaacgtagaaaactgagatgaaatggacaaattcctaaaagacacaaattagtagaaaggtataaagtgccaaagctgacttaggaacaaatagaaaatgtgaagaaacttataaaaagtaaagaagctgaataaataatttaaattcttcccacagagactatcccggggtcacatttgatgaattcgatcaaatatttaaggaaaaagtaatgttaattatttacaaactcttcttctaaaaaatagaaaaggagggaacactctccaatttattttttcaggtcataagtactgtcctttcaaagtcaggcaaagacatctcaagaaaataaaacaagatgaatatccatcttgaatataaatataaaattattaataaaatatgagcaaaccaaatccagcaataaataagagggattatataccctgagtaagtgggatttgtccaaggaatgcaatgatggtttaacatcagaaaattagttaatggcatgaattatattaatagaataaaggacataaattacataatcacctaagtagagtcagatgaaacatttgacaatattcaacagtcattcatgattaaaaaaaaaaatcaacaaactgggaacagaagaaaactttcttcatctgataaactgcatttatgaaaaacctacagattactcatattaaatgataaaacagaatgcttttctcctaaggaacaaggcaaggatgtccactgtcatcttgtcaccacttttattcattactgtacaggagattctagccagtgcagtcaggcaagaaaacaaaaagacattcggattgtaaaggaagcagtgcaacttcctttattcaccgaagacataatcctatatgtaaaaactcctatggaatgtacaaatatattattataactaataagtttaccaaggttacatgatatgagatcaacatacagagatcaattatatttctgggtagtagctatgaataattaaaaaataagaaaacaatttattcacagttgcatcaaaaaagattaaagtgtttagaaataatttaagagaccactccagaatttatacactgaaaatattactggatgaaatttataaggatttaaataatggaaattaaataaatggaaagacttaacttgttcatggattggaagaatcaatagtaagatggtaattctcaaattgatatatagattcaatgcaatttctatgaaaataccagggcttttgttttttggtttgttttttactaggaattgacaagctaatcctaaagtgtgtatggaaatacaaaggatctagaaaagtccgaataatcttgaaaacgaaaaatttggtagaattatattacactatttcaatgtttcctgtgaacctacattaatatagttagtatagtattggcacacataaagatttataggtaaatggaacaaaatttgtgaatctagaaataaacccttatatttgtggtcagtttattttagccaaagaagccaacacaatttaattgaaaaagacagtcttttcaacaattggtgctataataattgaatatttgtatgtacaaaatacccttaagtcctagctctcaccatagagaaaaatcagctttcagtgaatcataatcctaaatgtaacctctaaaattctaaaacttctagaatatattaattagacattcttagatacaatctcaagagtaaaagccctaaaagaaaaaaagataattggatcttcaataaaattaacacttatacttcaaaatacaccactaagagaataaaaagacaagccacagacttgaagaaatattagcaaatcatgtatttgataaagggcttctatgtagaatatataaagaattcttacaaatcaataagaagataaataatctactttaaaaattggtaagacacttgaagtatttcatcagagaaga

SEQ ID NO: 4467 - DNA, 2229 bp, Homo sapiens
  source 1..2229: mol_type = other DNA
ttcagggctagtgattgtgtccaccattggagtattgaagagcaggcttggtggtttagctctacccagctttgtccccatcaggggctgagcagagatctcaggctactgtgcattacacagtctggccaatttgaagcaacagagagatccttccagtaaacaaagatcaagcatatacccatctgcttctgctgtagctggcctttacacataagcaccacctattggtctgtaggttaaattgcacaacccaatacaaaatctgctaacacaagtgcacagttctggggaatgagataaacttcctgagacctccaccatcctggcccaagaggcagtgagtttgttcacatgcccagtacatcacttctacaactagtatttgagaagccatcacacaaagcatgtctgaaaccaagtaactcatagaaactttgctttcagtggaaagcacccagaataaaagccaaaaggccatacacaacatatattatagtctcatccttaagatggaaaaaaaatcatgtccaaacaaaagtaaattcaaaaataagaagagagagtttatccagatgagaaggaactagagagacaattctggaagtatgaaaaaacagagtattacaacacctccaaaggatcatactaactctccagcaatagatcctaatgaaaatgaaatcttttaaataccagataaagaattcagaatattgatactaaagttcaatgatacccaagagaaagttcaaaaacaatacaaagaaatcagaaaaacaatttaagatataaatgaacagtttattaggagatacttttttaaatccaccagaacttttagaaatgaaaaattcattgaatgaattacaaaatagagttgaaagttttaacaagtagactaaaccaatgagaagaaagaatgtcagagcatgaagacaggtcctgcaagttaatccagctagaaaaagaaaacagaattttgaaaaataaagcctttgagaagtatgagattatgtaaaacctccaaaccttgtcatagggagaaggtttcttcctgagggagaagaaaaagaaaaaagtttggaaaacctatgtgaggagataattgaggaataattctctcatcttactagagatttagatgttgaaatagaagaggctcaaggaaatccaaaagatatattgcaagatgactcgaccaaaatagtcttcagacaaagtcagtgtgaaggaaaggaatcctaaaatcagcaagagaaaagcatctaatctcctgtaaaggaaaccccaacagacttacagcagaatgctcagcagaaactctataagccagaagaggttgggtgcctaatttcagacttcttaaaagaaaaagaaaactgtcagccacgaattttgtatgctggtaaactcagctcggtaagtgaaggggaaatagtatttcccagacacgtgaatgccaaaggaattcatcaccactagactggtcctacaagaaatgctcaagggatttctaaacatggaaatgaaaggttgacactcaccatcataaaaacacatgaaaggataaaactcacagatcttataaaacagttccacaactgagactacaaagcaactaggtaagttaacattatgataggaacaaaacctcacataccaatattaattctgaacataaatgggttaaatgctccacttaaaagatacagcttggcagaattgattaaaaagcaggatctaatcatatcttgcttacaagaaatccacctaactgctaaagacacgtaaagactcaaggtaaaggggtggaaaaagacattccttgcaaatggaaagaaaacgtgagcaggagtagtcatacttacatcagataaaacagattttaaatcaacagggaaaaaaagataaggtcattatataatgataaagggatcaattcaacaagaagatatagcaattctaaatatatatgcacccaatactaggccacccagattcataaagcagatactgctatacttaagaaaacagatagtaatacaataatagtggataggggacttcagccccccactgacagcactaaatgggtcatcaagacagaaagtcagcaaagaaacactggacttaaattggactctagatcaaatggacctggtagaaatttacagaatattcacagcagccatagaatatacattcttctcattagtgcatggaaca

SEQ ID NO: 4468 - DNA, 1607 bp, Homo sapiens
  source 1..1607: mol_type = other DNA
cagaacaccaatgaagtcactgatgacaaaagcaaatggacaaacattctaagctcttggattgtaagagcttaaattaatatggttaaaattgccacctacatattcagtataattcctatcaaaataccaaggtcatttttcatggaattagaaaaaataatctgaaaattcatattgaaaaaagcccaaatggtgaaagcagtcttaagcaaaaaaagaagaaaagtttattgcatcacattacctgccttcaaattatactacaaggctattgtacccaaaacagaatgctactggtaggatagcaaaaacataaatcagtggaacaaaatagagaacccagaaataaagtcaactgatttttgacaaagttgacaaaacatatgctggggaaagtacactcttttgaataaatggtcctgggaaaattgtgtagccatatgtagaagaatgaaactgaacctatatctcttatcatatacaaaaattaactcaagatggattagagacttaaatgtaagacctgaacctataaacattttggaggaaacctaggacaaacctagaaaacctaggacaaacttgaacattggcctaagcaaaaaatttatgagtaagatctcaaaagcaaatgcaacaaaaataggcacatgggagttaattaaactaaaaagcctctatgtagcaaaataaataacagagaaaatagactacctacagaatgcaagaaaatatttgcaaactatatatctgacaaaggactaatgcacagaatctacaaggaagtcaaacaatgcaacaagaaaaaaaatacgtaaccctgttaaaaagtggataaaggacatgaacaaacatttttcaaaagaaaacatgcatatagccaacaaggagatgaaaaatgctcagtatcactaattatcagagaaatgcaaaataaaatcaaaatgagatagcaccttataccagtcagaatgactattaaaaagtcaaaaaaaaatagttgttggtgaggaaaagggaatgcttatacaccattagtgagaatgtaaattactacaacctctatgcaaaaatatggagatttctcacagaactaaaaatagaactgccatttaatccagtagtcctactactgggtatctacccaaaagaaaggaaattatatcggagacacctccactcacatgtttattacaacactattcacggtagcaaagataaggaattaagttcacggtagcaaagataaggaattaagtgtcaatggctgatcagataaagaaaatgtgtgtctgtgtgtgtgtatatatatgtatatacacacaccacggaatactattaattcataaagaagaatgaaatcatgtcttttgtagcaacatggatagaactggagggcattatcttaaatgaaataactcagaagcagtcaaatattacatattcttactcataagtgggagcttaaaaatatgtatacatggacatagagagtagaataatagacattggagacttggaagggttggagtggggtgagggatgaaaaattacctaatggttacaatatttaggtgatggttccactaaaagcccagacttca

SEQ ID NO: 4469 - DNA, 538 bp, Homo sapiens
  source 1..538: mol_type = other DNA
gtcctttcatcatattgttcattgaaaacaaccaattccagctggggccactgtgtggagtttgcaatctctccccacgtctgcatggcttttttctgggtactctggtttcctcccacatcccaaatatgttgccgtatctaaatggtcccagtctgagcgagtgtgggtgcatctgtaagtgtgccttgtgaaggaatggcatcctgtccagggttggttctcatcctgtgcactaaccttccaggatacactgcagccactcatgaccctacactggaaccgttgggtaaataatatttttattactctttcttaaatttacctccagctcacagttgtttcagtgtttaatattacaagttttttggtctttatctagaagtctggtgatgtttttataaccagaaatatgccataaggacttaattcttgtttctgtccattagcctacggtaaaagtggtttcattatacatcatttcctttaaagtcatagtttccaagaatctactgacaacattaagtgaggacttact

SEQ ID NO: 4470 - DNA, 583 bp, Homo sapiens
  source 1..583: mol_type = other DNA
gtgatggttaataataggtgccaacttgattgaattgaaagatacctacatagctggtaaagtattgtttctgggtgtgtctgtgagggtgttgccaaaggagattgacatttgagtcggtggactgggaaaagaagacccaccctcaatatgggtgagcaccatccaatcggctgccggcgtggctagaacaaagcaggcagaagaaggtaggataagttggcttgctgagtcttctggctttcacctttctctggtgctggatgcttccttccattcttcctgaccctggacatcagactccaggttctttgatctttgcactcttgtacttgcaccggtggtttgcagggggctctcgggcctttggccacagactgaaggctgcactgttggcttccctgctgttgagacttctggacttggactgagccactactggcttctttcttcctctgcttgcagacggcctattgtgggacttcactttgtgatcgtgtgagccaattatccctaataatgccttttcatatatacatatatctgattagttctgtccctctggagaaccttgactaatgca

SEQ ID NO: 4471 - DNA, 319 bp, Homo sapiens
  source 1..319: mol_type = other DNA
ggccaggtatgatgtctcatgcctgtaattataatcctagcactttgggaggcccaggcaagaggattcttgagctctggagtttgaggcaagcctgggcaaattagcaagaccttgtgtgtactaaaattaaaaaaaaaatcagctggctgtggtgggacaggactgtagtcccagctactcaggaggctgaggtggaaggatcatttgggcctgagggattgaggccacagtaagccatgactgtgccgctatactccagcctgggcaatggagcaagaccctgtctcaaaaaaaaaaaaaaaaaaaaaggaagaaa

SEQ ID NO: 4472 - DNA, 336 bp, Homo sapiens
  source 1..336: mol_type = other DNA
acattgtaattccccagtgttggaagagtggcctggtggaaggtgactggatcctggggacagacttaccccttcctgttctcatgatagttctcaagccatctggttgtttaaaagcctgtagcaccgcccgcttagctcttgctctcttctgctctggccacatcagatgagccagtttcccctttgccttccaccatgattgaacgttgcctgaggcctccccaggcatgcttccaataaagcctgcagaactgtgagccaattaaacctcttttctttataaattacccagtctaaggtatttccttcagcagtgtgacaatggactaatac

SEQ ID NO: 4473 - DNA, 171 bp, Homo sapiens
  source 1..171: mol_type = other DNA
agataggagagctaagttccaatcttagttccaggttttgtcaatatgcaaacaggtgccactgaggaagtcttcagctttttaatgctttagtttcctcttctacaaaatgaggatacttagctggatgatttctaagaaattcctcacttttgaagctctgattatatg

SEQ ID NO: 4474 - DNA, 3341 bp, Homo sapiens
  source 1..3341: mol_type = other DNA
aaagctgcttaccacccctttgaaagtaccttgtacactcatggttaaatcataaccttaattgaggcttcttgatttcacctgttaggttacttttggtaaagttcaaaaaccagaaatgttaattatttgatgtggctaaaattaggtaacatgagatttaaaaggattttcttaaagagtgcttagcttaattaaaactggatatccaatctacaagtatatgtacaaggcctttatgtttttctcttcttggatcttgtttttctggaacaggtttttttctcagtcaactgaattctttttctccactttgttttgccactcttaatgcatgcatgagaggccctaagataatttctgatggcctgggactccttgggaaaaaaatgaaaaggcaccacaggttccattttgggagaaacctccattttcctcatgaaaccgcaggaattagaggcaggtagatccctctcaaaatctgtttttgtcctccagcatacctgtttattagaccctagaaactgcatgctttcctagccctgctcttaaacagcaccacccagaggccaataattcaattaggagattgatgaacaaaaatatctgataaatactggatctgcttctgtttgcttgtgtagttatatatgtattgtgtgtgatgcctataaaaagagctctaattgattggcttaaagaaaaataagtgcttaaatcaaattttttaaaggaaatataaaagctgtaatgccttttagttcacataactttaatctttaagaaataaaaatagttttaaaaataattggtaaaatgcagatgtcaaaatgtaaataggtggcctaaatcatgtaagtcagatactaggtttgctaaatgtttcaaggttgtaaactgcctgctttacaagttggtaaggcctgggtacatacaagattaaccccacccctaactatgctggaaaaagtcagaccttatctgggcctagtacataattaaaacaatgtaccagttttacattaaagttaaaaattgccaagagttaccattataacatgtaaatgagactacgaaaaatagatttacatgaaaggtgtgtaagaacagtaaaatgtgtttgtggtaaaagattgtaaaaagatatagaaatgtaaatcttgcctagggataaaggattgttttaaaaccaatgtaagagtaaaatttggctttctctcccttgcacaagattttcatgtaatagtgaaggataatgaaaattttttatttgccttgcagataaactgccagggagaagaatgagaagacaggagacaaactgtttggaaagctaaatcttccctcttaatgaataaaggtttttgccttgtcttaaagtttctgagtcctaattttggcaaaataaataacttatggtaatctggaattgtattttgtaatattaagtgttttgaacctctaacatttacttcccaaaatcaaacttcagtttcaaaattgtctctcttgacccctagcttttggatgctacagaaggcccctgaagcatccagaagagaggtaaacaggattatttaacatgtttaggtacatgggattggccaaatggtgtttaatgatcttcaggttatattttagtgaataatattaatatattttccaaaattgtatgggatttctaaaattctaatgtctgagtatatgctagaaatcataattaaggttattatgttaagttattgtaaaacacagaaataataaaatttgtcagtcatgttcttgactaactaccttggacatttcaccattcaaaatcgtcttgttttaatcctctttaaaggatggtttataatcagctataggactttgacacatgctctcaaatgcaagtttctgataactttggagattatgacattggaataaaggaaaaatgtacaggactcatgaagagctaaaatattcatgaatatcaagcaaaacaagagttaacaaaatggactttttaacctttttgcttaaaatgttgctgatccttattttgtttttcagagtcaaggaaacttattttaagctatttatagcctctaataattatgtaaggtatacttctgtaaataaaattcagagcatatttatttgtttctctctggttcctctagaacttggaaagtatttgtgagtattcttaactcatggcaatataattatttgcatcagcacaatgagaatcattttcttttacaagaggacacaattggagaaactggttgttttctcaaggttttgactaaaggctgtgcttccctttaaggaatcgagcttgacttgcagagccaataaaagccccttgggaaaactgcctcatactttgtctacacagcccccgaacagggttcctaacctgtggtgagtaaagaatatcactttctacaggcccaggaacaccatgttcttaggacctcaaggagagaggaattcacccaactcataggtatttgagggtacaaacccatggctgggctcagctttaaaaagttctgagattcctgtggaacagtttcatcaaagataatataaaaacctatgtaaaaataattattcttgctgtgctttgtacaaataatcaggccaagtataaaactaaagttgattttgcaaacaactcagtcctatcatgatttgtttttttaacaaaaatgagtagagacagaaaaattatgtttcaaaacatatcatatgcttgtcattaattctaatctcattgattgtttttaagtttttgcctacattttaaactaatcctgcttattcctataagccaaccagcaatctctggctgcagctcagaaagtgcaaaaagggatgggtgatgtacaaatctgaatattctagttcttggcaattatcctacaaatcctgtcaggtgatgggagtaaatagggtacccataacccagaggtttctttgggaaaataaaaccaaggaagttaaccaaagccaagccccttgcactcaaatcttagtgggcataactgtggccaccagttatctgtacatgtcagcagccttgggatttttaagctgtgcttatcccctgcttgtttcctctaataacccaaattgtttcttcttgcctaaagactatcaaactccaaatggtaatgcaaatgaaacaatacatggatatgcctttcttccaggaatccttagaccagccccaggagaaaccctagctgctgttccccatgcagtgcccctttccagtaggaagtagctagaagaatcatcaccccattccccctaagaccagttagggtctccacccttgaggaggg

SEQ ID NO: 4475 - DNA, 161 bp, Homo sapiens
  source 1..161: mol_type = other DNA
tcaagtaagatctgaattctaatgctggcttgtgcctcttactatgtggtttggtcattatagataatgcccagtttcagtttccccatctttgaaaaggagataatatgttatctcttgggagtagttctgaatatgaagtgtgttgatacaagaagcac

SEQ ID NO: 4476 - DNA, 112 bp, Homo sapiens
  source 1..112: mol_type = other DNA
atgtaccaaaacattgatctggctaccactgggagtcaggatcatgagttcatcttcttccttcttactgcttttccaaacattctccagtaagcaggtactacatttataa

SEQ ID NO: 4477 - DNA, 111 bp, Homo sapiens
  source 1..111: mol_type = other DNA
atagaaaaagactaagggaatatatggaaatattaacaatgtttattttggatgaatggaattctagatgactttaattttctttatatcagtatttttcagattttctat

SEQ ID NO: 4478 - DNA, 6533 bp, Homo sapiens
  source 1..6533: mol_type = other DNA
gaggaaaatgatggataggtggcaggactaacttacacctcccacttggatggacagagcagtgtgtggagactcacactgtgaacttttgctccaagaactagtgcaggaatacaccaggaaagtcgagagaatccacagaccctttgaaggaagtgcaggctctgggagacatccaaaaaactgtgagtgcccaaagtgtgaaggtgtgaaagggggatcgtctgcccctgaacacacatcctcactggggaacctgaaggtccagatcatgggagaaggatttgaccttacctggagctgagataaacatagagagctgagtgaaatacaggggtagacgaagcagtgggaagagcatgtgggcactctttgttcccagggaagccatttctgactttgtctcacaggggtccttgggaagggataccagtggaattggggaaagactacagggagaaggaaacctccagctgaactttgtaacaatttcaaccaaacatgaagtttcctggacagaatctgggtgagagggtgaactgggagcgcagaaacagcacagaagttgtggcaggcaggaaggcatgaaacctgaaagccctacttgctttcccagcgggaaggcctggagcctgggacaaatcctcagccctgcttacccactgcctggaaataaacctggtgctgttgggggggttggcacggtgaaagtaagaccggccttttgggctgtgtgggagctgggtgagagctaggtgggggctgtaactgctggctttcctccacttccctggcaacctgcatgatgcagcagaggcagccataatcaccctgggaatataactccattggcctgaaaatgacacccccattccccacagcagcctcagcaagcactgcctgaggagagtctgagctcagacatgccttaccctgccccaaacttatggtctttctctacccaccctggtagctgaagacaaaggacataatctcttgggagctgtatggccacaccaactacctgagaaacttttccaggtgacactagggtaagcctgtatcctctctatagtaccacagctgatgctgttttgaaagtgccacctcttggctggaggccaacaaacccaaaactagcacagtaaacaaaactgcaaccaaggaccctcacagagtctactttactcacctgctatctctaccagagcaggtgctggtatccagggctgagaaaactgaagatggatcacatcacaggactctttgcagacactccccagtagcagcctggagcctggtagctctgctgggcagctagatccagaagagaagtaacaacctctacagtttggctctcatgaagcctcatccctgagcacccacatccaggtaataccctatgggacaaaagaatctgaacaatagcccttgaacactggatctctgatgtagtctacccaaatgagaaggaaccagaaaaacaattttggtaatatggcaaaacaaggttctttaacacccccaaaagatcacactagctcattagcaatggatccaaatcaagaagaaatctctgaattgccagaaaaagaattcagaaggtcaattattaagctactcaaggaggcctcggagaaaagtaaataccaactcaaagaaattttaaaaatgttataggacatggatggaaaaatttccagagaaatagatagcataaataaaaagcaatcacaacttctggaaatgaaggacacacttacaaaaatgcaaaatacacagaaaatcctcagcaacagaatagaacaagtagaagaaataacttcagagctcaaaaacacggcctttgaattaacccaatccatcaaagacgaagaaaaaagttaaaaaataaacaaagcctccaggaagtttgggattatgttaaataacaaaaatctaagaataattggtgatcctggggaagaagagaaatctaaaagtttggaaaacatatttgagggaataactgaggaaaacttcccctgccttgctaaagatctagacattcaaatacaagaagctgaaagaacacctgggaaattcatcacaaaaagataatcacctaggcacataatcatcaggttatctgaagtcaagactaaggaaagaatctgaagagcgtgaggcaaaagcatcagtaacctataaaggaaaacttaccagattaacagcagatttctcagcagaaaacctacaagctagaagggattggggtcctatctttagcctcctaaacaaaacaattatcagccaagaattttgtatccagtgaaactaagcttcataaatgaaggaaagatacagtcttttctagacaagcaaatgctgagagaatttgccactaccaagccagcactacaggaactgctaaaagcggctctaaatcttgaaacaaatcctcaaaatacaccaaaatagaacctccttaaaacataaatcttacaggacctgtaaaacattcacacacacacacacacaccccaaggtactcaggcaacaaatagcatgatgaatagaatagtacctcacatctcaatactaatgttgaatgtaaatgacctaaatgctccatttagaagatacagaatggctgaatggataagaattcaccaaccaagtatttgctgtctttaagagactcacctaacacataaggacttccataaacctaaggtaaaggggtggaaaaagatattccatgcaaacagacacgcaaaagtgagcaggagtagttattcttatatcagagaaaacaaactttaaagcaacagcagttaaaaaagacaaagtggaacattatataatgataaaagggcttgttcaacaggaaaatatcacaatcctaaatatgtatgcacctaacctgcagctcccaaatatataaaacaattactactaggcctaaggaatgagatagaaaacagcacaataatagtgggggacttcaatacttcactgacagcactggacaggtcataaagacagaaagtcaacaaagaaacaatggacttaaactctacaacagatggacttaacagatatttacagaacgttttagccagcaactgcaaaatatatattctattcatcagcacatgaaacattttccgagatagaccatatgataggccacaaaacaagtctcaataaatttaagaaaatagaaattatatcaagtactctctcagatcacagtggaagaagattggaaatcaactctaaaaggaaccctaaaaccgtgcaaatacatgaacattaaataatctgctcctgagtgattgttggcttagcaatgacatcaggatggaaattaaaatttttttgagttgaacaataatagtgacacaacctatcaaaacctctgggatacagcaaaggcagtgctaagaagaaagttcatacccttaaatgcctacatgaaaaagtctgaaacagcacaaatagacaatctaaggtcacacctcatgaaactagagaaagaagaacaaaccaaacttaaacccaacagaagaaaagaataacaaagatcagagcagaactaaatgaaattgaaacaaaaaaactacaaaaggtaaatgaaacaaaaagcttgttctttgaaaagataaataaaattgataggccataatgagattaaccaagaaaaaaagagagaagatacaaataagctcaattagaaatgaaatgggaagtattacaaccaataccacagaaatacagatcattcaaggctactatgaatacctttacacacataaactagaaaacatagaggagatggatatattcctgtaaatatacaactctccttggttaaaccaggaagaaaatgaaactctgaaaagaccaataacaagcagtgacattgaaatgataattaaacaattgcccacaataaaaagcccatgaccagatggattcacagctgaattctatcagacattcaaagaagaattggtgctaatcctgttgacgctattccacaaggtagagaaatagggaatcctccctaactcattctatgaagccagtatcacccaataccaaaaccaggaaaagaaataactaataaagaaaagtaccgaccaatatccctgatgaacatagatgcaaaactcctcaacaaaatgctagctaactgaatccaacagcatgtcaaaaagataatccaccatgatcaagtggatttcaataaatgtgatataccacataaatagaattaaaaacaaaaatcatacgatcatctcaatagatgcagaaaaagcattgacaaaatccagcatcccttcattattaaaactctcagaaaatcggcatagaagggacataccttaatgtaataaaagccatccattataagccatctattaaaagccaacgttatactgaatggggaaaagttgaaagcattccccctcagagctggaacaagacaaggatgcccactctcaccacttctattcaacatagtaatggaagtgctagccagaccaatcagataagagaaagaaataaagagcatccaaatcagtaaagaggaagtcaaactgtcactgtttgctgatgatatgattgtatacctagaaaaccctaaagactcctccaaaaagcttctagaactggtaaatgaattcagcaaagtttcaggatataaaattaatgtacaccaacagtgaccatcctgaaaatcaaatccagaacttaacccctttcacaatagctgcataaataaatacataagtaaatacaatataacacttaggaatatacctaaccaggatgtgaaagacctctacaaggaaaagtatgaaacactgctgaaagaaataatagacaatgtaaacaaatggaaacacatcccatgctcatggataggtagaatcaatattgtgaaaatgaccatacttccaaaagcaatctagaaattcaatgcaattcccataaaagtaccaccatcattcttcacagaactagaaaaaaaaatcctaaaattcatatgaaacaaaaagggagccctcatagccaaagcaagactaagtagaaaggacaaatatagaggcattaccctacccaacttcaaactatactataaggctatagtcaccaaaacagcatggtactagtataaaaataggcacatagaccaatgggacagaatagagaatccagaaataaacccaactgcttacagccaactgatcttagactagccaaacaaaaacataaagtggggaaagaacagcctattcaacaaatggtgctggggtaactggcaagccacatgtagaagaatgaaactggatcctcatctctcaacttatataaaaatcaactcaagatggatcaaagacttaaatgtaagacctgaaataataaaacttctaaaagataacattggaaaaacttttctagacattggcttaggcaaagacttcatgaccaaaaatccgaaagcaaatgcaacaacaccaaagataaatagatgagacttaattaaactaaaaagcttctgcacagcaaaagaaacaatcagcagagtaaacagacaacccacagagtgggagaaaatcttcataatctatacatctgacaaaggactaacatccagaatctataaggaactcaaacaaatcagcaagaaaaaaacccaaaatttcccatcaaaaagtgggctaaggacatgaataaacaattctcaaaagaagataaacaaatggacaacaaacatataggaaattgctcaacatcactaatgatcagggaaatgcaaatcaaaacagcaatgtgataccactttcctcctgcaagaatggcataatcacaaaatctaaaaataatagatgttgatgtggatatggtgcaaagggaacacttttacacagctggtgggaatgtaagtagtacaaccactatggaaaacagtatggagattccttaaagaactaaaagtagatctaccatttgatccagcaattctactactgggtatctacccagaggaaaagaagtcattatatgaaaaagatacatgcgcacacatgtttatagcagcacaattctcaactgcaaaaatatggaaccagccctagtagataaagaaaattgatatctatatatctatatatataccatggaatactattcagccataaaaaggaacaaattaatggcattcccagcaacctggtttgaattggagacaattattctaagtgaagtaactcaggaatggaaaaccaaacattgtatattctcactcatatgtgggggccaagctatgagaacccaaaggcataagaataatataatggactttggggactctgggggaaaaggtggagggaggtgagggagaaaagattatacattgagtacagtgtacacttcttaggtgagaggtaggtgcaccaaaatctcagaaatcatcactaaaggaattgttcatgtaaccaaacaccaccttttccccaaaagactattgaaattataaa

SEQ ID NO: 4479 - DNA, 480 bp, Homo sapiens
  source 1..480: mol_type = other DNA
cctaaggatgccaatgtttttaattctcaggaactgtgaatatgttatgccacattgcaaaagaattttgcagaagtgattaatttaaaatgttattaagggccttgagatggggagattatcctgaattactttggagggcctaatataattgtagggatctttaaaagttgaagagggaggcaaaagaggaggtcagagtgatcctgtataagaaagacaactacttttgaaggaagttaaaaggtggctttgaaggaggaagacaccttgagccaaggaatgaagggggcctgtaaaaaaagattgaaaaggcaaggaaacagattctccattagagtccccagaaaggaatgcagccttgctggcacctttttagcccagtgagatcaatgtcaaacttctgacccacagaaccataagatggtaaatttgtgttgttttaaaccactgagtcagtgataatttgctgaagaagca

SEQ ID NO: 4480 - DNA, 299 bp, Homo sapiens
  source 1..299: mol_type = other DNA
gccaggtgcggtggctcatgcctgtaatcccagcactttgggaggccaaggcgggtggatcacgaggtcaggagttcaagaccagcctagccaacatagtgaaacccccgtctctactaaaaatacaaaaaattagccaggcatggtggcaggtgcctgtaatcccaactacttgggaggctgaggcagagaattgcttgaacccgggaggcagaggatgcagtgagctgagatcgcaccactgcactccagcctgggcaacagagcgagactccatctcaaaaaaaaaaaaaaaaaaa

SEQ ID NO: 4481 - DNA, 293 bp, Homo sapiens
  source 1..293: mol_type = other DNA
ggccgagcatggtggctcacccctgtaattccagcactttgggaggctggggcaggcggatcacctgaagtcagagttcaagaccagcctggccaacatggtgaaaccctgtctctacaaaaatacaaaaattagctgggtgtggtggcgggcgcctataatcctagctactagggaggccaaggtgggagatcgcttaaacccaggaggtggaggttgtagtgagccaagattgcaccacggcacgctagcctgggtgacacagcaagactccatctcaaaaaaaaaaaaaa

SEQ ID NO: 4482 - DNA, 295 bp, Homo sapiens
  source 1..295: mol_type = other DNA
ggtgcagtggctcacgtctgtaatcccagcactttgggaggccgaggtgggtggatcacgaggtcaggagttcgagaccagcttggccaatatggtgaaaccccatctctaccaaaaatacaaaaattagcccggtgtggtggtacacgcctatagtcccagctactcaggaggctgaggcagaagaatcgcttgaacatgggaaatggaggttacagtgagccaagattgtgccactgcactctagcctgggcgacagagtgagactccgtctcaaaaaaaaaaaaaaaaaaaa

SEQ ID NO: 4483 - DNA, 155 bp, Homo sapiens
  source 1..155: mol_type = other DNA
gtggtccttaattaggggggtggcacctacctgggatcactggaaaatatggagggcatttctggttgtcactatgactgatgaggggagatgtacaactgccatttagtgtccatggaacaggtttgctaacatcctcttagtatgctagacag

SEQ ID NO: 4484 - DNA, 591 bp, Homo sapiens
  source 1..591: mol_type = other DNA
tccaagtgctctctaccacacctcaaacctagcagtatctttagcattctttcctttcttcccactcacttctgtgaaagggagagctttctctttaaaccccaggctaatcctcaaatcctctggccagctctgggacttgcactatccaataacctatcctttctctcttttactttctaatggctcttaccttgggcacaataaacatgctcaagtttttcccattttaaaaacccttactaaccacatgactctcttccattttctttttctttcacatcaaagtttcttgacaaaatagtttatgatgatctgttattccttcctcaagcccatctcattcacttctcaatctgtagcatctggctgctatcacctcttcactgggccacaatgactacccattagcccaacttattaaagaattcagtttttatcttccttgatttctctagagcatgagacactgtgaacatttccttctttcaaattctctttggcgtccaggaattaactttttttttcccttggcattcttcaacctctggtagatccttatccattttttcacaagtgccattttcactc

SEQ ID NO: 4485 - DNA, 37 bp, Homo sapiens
  source 1..37: mol_type = other DNA
cctggtgtggtggctcacgcctgtagccccagctatt

SEQ ID NO: 4486 - DNA, 60 bp, Homo sapiens
  source 1..60: mol_type = other DNA
cactgctctccaagctgggcaatggagtcagattctctttcttaaaaaaccacaaaaaaa

SEQ ID NO: 4487 - DNA, 326 bp, Homo sapiens
  source 1..326: mol_type = other DNA
gccaggcacagtggcttatgcctgtaattgcagcacttttagaggccgaggcaggcggatcacctgaggtcgggaagtggatcgcctgaggtcaggagttcgagaccagcctggccaacatggcgaaaccccgtcgctactaaaaatacaaaaattagccaggtgtggtggcatgtgcctgtaatcccagctatttgggaggctgaggcaggagaatcgcctaaacccaggaggtggaggttgtagtgagccaagattgcaccgctgtgctccagcctgggcaacagagtgagactcttgtctcggaaaaaaaaaaaaaaaaaaaa

SEQ ID NO: 4488 - DNA, 300 bp, Homo sapiens
  source 1..300: mol_type = other DNA
gctgggcacagtggctcacgcctttaatcccagcactttgggaggctgaggcagatggatcgcctgaggttgggagttcgagaccagcctggccagcatggtgaaaccctgtctctactaaaaatacaaaaattagccaggtgtggtggcgcacacctgtagtcccagctactcgggaggctgaggcaggagaattggttgaacccaggaggcggaggttgcagtgagcagagatcgtgccactgcactccagcctgggtggacagagcaagactccgtctcaaagaaacaaacaaaaaa

SEQ ID NO: 4489 - DNA, 301 bp, Homo sapiens
  source 1..301: mol_type = other DNA
gccacgtgcggtggctcatgcctgtaatcccggcactttgggaggcctgagtggatggatcacttgaggtcaggagttcaggaccagcctggccaacatgatgaaaccctgtctctactaaatatacaaaaattagttgggtgttatggtgcatgcctgtaatcccagctactcgggaggctgaggcaggagaattgcttgaactcgggaggtggagattgcagtaagccgagatcgtgccactgcactccagcctgggtgatagagcaagactgtctcaaaaaagaaaaaaaagaaaaaa

SEQ ID NO: 4490 - DNA, 284 bp, Homo sapiens
  source 1..284: mol_type = other DNA
ggccaggcgcggtggctcatccctttgggaggctgaggcaggtgtatcacaaggtcaggagttcgagaccagcctgaccaatatggtgaaaacccatctctactaaaaaaaacacaaaacttagccaggcatggtggtgcacgcctgtaatcccagatactcaggaggctgaggcaggagaatcgcttgaacccgggaggtggaggttgcagtgagccgagatcacgccactgcattccagcctgggcaacagagcaagactccatctcccaaaaaacaaagaa

SEQ ID NO: 4491 - DNA, 899 bp, Homo sapiens
  source 1..899: mol_type = other DNA
cagctgagcactctcttctaaaaatcattttcttcttagcttccatgacacctctctgctggttttcttctatcacaaagacctcttcatttcctttgctggctcttcttcctctggctggcttttctggggcttccttccattgtttaccacatactctcccagtcacatgctttacattccacttaaaaccaatgatgcccaaatctttatattcagtcctactctttgacctcaggacgataagtgcctcattaacagctctacctgggatgtctcgtaggcatatctgaaattagcacaacaaaatgcttcatttttctctccaaatcctcagccatcttagtaactggcactacttatctgtcattttgcttaggtcaaagaatctaagctatctctgattctgctctttaactccaatgtccgcattcaaagtaccaagcaagtcttaccatctaagttcaaaatgtatctcaaatccatccttgccagtccaactccattactatcactgctgtacaaacatcattcctcacttgtgcccacttatctcctgtaccaaaggatttacaaaatgtaaaatatttaggtcacctctttgtttaaaaccctcagaacagcttcttataacattctgatgaaaacacactctgctgtgtaatgtaagtaagcctctgcttacttcctaccctcattgtatggcattcctctttccccaccaggcattaagccacttaccttctcttagtccctcaaatatatcaagcttattctcactataggtctctaagagctcttccctctgcctaggatattctttcctttgatattcacatggttggctctttcttgtaaatcagatttcagcttaatttcacttcctcagcgaggatttc

SEQ ID NO: 4492 - DNA, 75 bp, Homo sapiens
  source 1..75: mol_type = other DNA
ctaggagaagggtattcttttcactattctttcaaattttctgtatgttcaaacattttcatagtagaaagttgg

SEQ ID NO: 4493 - DNA, 752 bp, Homo sapiens
  source 1..752: mol_type = other DNA
ctctcttccagcattccacattcaatgtggagcaaatcctatggggtgtatcttcaaaatatacccagcatttgactacctgacaccactaccacctggtccaagccttcctcatctctttcctggattataggaatagcttccttgccaggttccctcttgctgttattgatctcttcagggacttctcaaaaaagcagccggaatgaccctgttaaaatgtaaacatcatatcaatgttgtgtccaaccctgtctgtggctttccatctgacaaggcctcacacaatctggtaccctgctaatcctctgatattaggtcttttatttttccctctaaatctggcccagtcccctgacctcctcgttgcttcctgaaggaagcacctgcccctgtttccagccactacacttgttttcccttcctggaatgtccctggataccagcagggctcactctttcactttgttgagatcttttgtcaaatgtcaccttctcagcaaggcactgtttggccagcctactgaaaactttatcccacctcccaacatttcctatccctcttctggcttcattttttatctacttaggacttacaagcagcaaatattttatatattttaacctatttattttctgtccaacccattattctatgcactccataaggacaaatttctttacattttgttcattatctggcattgcctagcacataatagcttcttaacaaaaatctgttaaatgagtaa

SEQ ID NO: 4494 - DNA, 5040 bp, Homo sapiens
  source 1..5040: mol_type = other DNA
gctagtatccatggctgagagacccatagatggttcacatcacaggactctgtgcacacaacccccagtaccagcccggagcctggtggatttgctgggtggctagatccagaagagagataacagtaactacaacttcactgttaggaagccatatccacaggaaaagggggagagtactacatcaagggagcacccatggcacaaaagaatctgaacaacagccttcagccttagacctttcctctgacagaggctacccaaatgagaaggaaccagaaaaccaactctggtaatatgacaaaacaaggctgtttaacaccgcccctcccccccagaaaaaaaatcacagtagctcaccaacagtggatccaaaccaagaagaaatccctgatttacctgcaaaagaattcatattagttattaagctaatcaggaaggcaccagagaaaggcaaagcctaatgcaaggaaatccaaaaaaaaaacaatacacgaagtgaagggagaaacattcaatgaaatagatagtataaataaaaaaaccccaaaacttcacaaaacactggacacacttatagaaatgcaaaatgctctgggaaatctcagcaatagaattgaacaagtagaagaaattcagagcttgaagataagatcttcgaattaacccaatccaacaaagacaaagaaaaaagaatatgaaaatatgaacaaagcctccaagaagtctgggattatgttaatccaccaaacctaagaataatcagcgttcctgaggaagaagacaaatctaaacgtttggacaacatatttggggaaataattgaggaaaacttcccaggccttgctagagacctagacatcaaaatacaagaaacagaaagaacacctgggaaattcattgcaaaaagattatcacccaggcgcattgtcatcaggttaactaaagttaagatgaaggaaagaatcttaagagctgtgagacaaaagtaccaggtaacctgtaaggcaaaacctatcagattaatggcagacttctcagcagaaaccctacaagctagaagggattggggcccaatcttgagcctcctcaaacaaaacaatgatcacccaagaattttgtatctagtgaaactaagcatcaaatatgaaggaaagatacagtctttttcagacaaacaaatgccaagagaattcaccactaacaagccaccactacaagaactgctaaaagaagctctaaatcttgaaacaaatcatggaaacgcatcaaaacaaaatgtcattaaagcataaatctcacaggaccaacaaaacaaaaatacaagttaacaaacaaacaaaaaccagggtacacaggcaacaaatagcatgacgtatggaatggtacctcacacatctcaatactaacattgaatgtaaatggcctaaatgctccactttaaagaaacagaacagcagaatgggtaagaattcaccaaccaactatctgctgccttcaagagactcacctaacacataaagactcacataaacttaaagaagcagaaaaaggcatttcatgcaaatggacaccaaaagcgaggagtagctattcttacaaaagacaaaactttaaagcaacagcaattaaaaaaaagacaaagagggacattatataatggtaaaaggctttgtccaacaggaaaatatcacaatcctaaacatatttgggagctgcacacctaaaagaggagctcccaaatttataaaacaattactgctagacctaagaaatgagatagacaacaacacagtaatagtgggggacttcagtactccactgacagcactagacaggtcatcaagactgaaagtcaacaaagaaacaatggatttaaactataccttggaacaaatagacttaacagatatatacagaacattccatccaaagccacagaatatacattctattcaacagtgcatggaactttctccaagatagaccatgtgatagaccacaaaatgagcctcaataaatttaagaaaattgaaattatgtcaagcactctttctgaccacagtgtaataaagctggaaatcaactccaatataaaccttcaaaaccatgcaaatacatggaaattaaataacctgctcctgaatgatcattgggtcaaaaatgaaatcaagatgaaaacttaaaaattcttcaaactgaatgacagcagtgacacaacttatcaaaacctcagggatacagcaaatgtggtgctaagaggaaagttcatggccctaaacacctacatcaaaaagactgaaagagcacaaactgatcatctaaggtcacacctcagggaactagagaaacaagaacaaaccaaacccaaacccagaaaaagaagggaaataaccaagatcagagcagaactaaatgaaattgaaagaaaaaaaatacaaaagataaatgaaaagttggttttttgaaaagataaataaaattgatagaccattagcaacattaaccaagaaaagaagagagaaaatccaaataacctcaataagaaacaaaacgggagctattataactgacaccacagaaatacaaaagatcattcaaggctactatgaataactttatgtgcatacactagaaaacctagaagagatggataaattctttgtaagatacaaccctcctagcttaaatcaggaagaattagataccctgaacactccaataacaagtagtgagattgaaatggtaatttaaaaattaccaacaaagaaatgtccaggaccagagagattcacagcagaattctatcagacattcaaagaagaattggtaccaatcctattgacacaattccagatagagaaagagggaaccctccctaaatcattctatgaagccggcatcaccctaatatcaagaccagaaaaggacataaccaaaaaagaaactgaagaccaatatctctaatgaacacagatgccaaaatccttaacaaaatactagttatccaaatccaacagcatatcaaaaagccaatccaccatgatcaagtgggtttcatactagggatgcagggatggcttaacatacataagtgaatagatgtgatacactacataaacagaattaaaaacaaaaattacaagatcatctcaatagatgcagaaaaagcattcaacagacttcagcattcctttataattaaaactcacagtaacattggcatgcaagggacatacctcaatgtagtaaaagccatctatgacaaacccacagccatcataatactcaatggtgaaaagttgaaagcattccctctgagaactggaacaagacaaggatgcccactctcaccactccccttcaacatagtactggaagtcctagccagggcaatcagagaggagaaataaagggcatccaaatccataaagaggaagtcagaagtgtcactgtttgctgatgatatgatcatttacttcaaaaaccctaaagactcctccagaaaactcctagaactgataaaagaattcagcaaagtttctggatacaaaattaatatacacaaatcactatctcttctatataccagtagcaacaaagtggagtatcaaatcaagaactcaaccccttttacaatagctgcaaaaaaaaaaaaaaaaaatacgtaggaatatacctaaccaagaaggggaaagacctctacaaggaaaactacaaaacctgctgaaagaaatcatagatgacacaaacaaatggaaacacgtcccgtgctcattgataggtagaatcaatattgtgaaaatgaccatactgacaaaagcaatctccaaatgcaatgcaattcccatcaaaataccaccatcattcttcacagaattaggaaaaaacaattctaaaattcatatggaaccaaaaaagcctgtatagccaaagcaagactaagcaaaaagaacaaatctggagccatcacattacctgacttcaaactatactataaggccatagtcaccaaaacagcatggtactggtataaaaataggcatatagaccaatggaacagaatagagaacccaggaataaacccaaatacttacagcctactgattttcgacaaagcaaacaaaaccataaaatggggaatggacaccctttttaacaaatggtgctgggatacagattggctagctacctgtaggagaatgaaactggatcctcatctctcaccttatataaaaatcaactcaagatggattaaggactttaagagccaaaagtataagaattctagaaaataacattggaaaaacccttctagacattggcttaggcagttttgggtttcatgaccaagaacccaaaagcaaatgcaataaaaacgaagataaatagctgtgacttaattaaactaaagagattttgcacagccaaagtcacagtcagcagagtaaacagacaacccacagagtgggagaaaatctttgccatctacacatctgacataggactaatatccagaatctacgacaatctcaaacaaatcagcaagaaaaaaaatcccatcaaaaagtgggctaaggacatacacagttctcaaaacaaaagaagatatacaaatggccaaaaaacatgaaaaaatgctcaacatcactaataatcggggaaatgcaaatcaaaaccacagtgtgataccaccttactcctgcaagaattgggcataatcaaaaaataaaaaaactgatgttgactgacatggatgcagtgatcatggaacacttctacactgctggtgggaatgtaaactagtacaaccactatggaaaacagtgtggagagttcttaaaggcctaaaagtagaactaccatgtgatccagcaatcccactactggatatctacccagaggaaaagaagtcattacatgataaagatacttgcacacacacttttatagcaacacagttcacaactgcaacatcatggagccaacgcaaatgcccatcaatcaaagagtcgatatagaaactgtgatatatatata

SEQ ID NO: 4495 - DNA, 1429 bp, Homo sapiens
  source 1..1429: mol_type = other DNA
tgcttgctttctcaacagggaagctcgtgatttagggtgagttctcagccctggtcataagctgcctggaaatagacttggtgctgttgtggagggcacggtgggagtgagactggcctttaggactctgggctgcgtgggagcagagtgaggcctatgacttccggctttcccccacttccctggtggcgtatatgactcatcagaggcagccataatccccctgggaatataactccattggactgggaaccacaacctcctcccccacagcagccatagcaagccccaccaaaggagagactgagctaagacactcctgtccctcccccaacctggtggtcttactctacccaccctggtagctgaagacaaaggttataatctcttgggagctctgtggccctgctgactgcctgagaaacctgaatacttgaccaggtgttcctagggcaaatttgcatcctccctataggaccccagctcatgtgctcttgaaagtgccaactcctggctggaatccaaccaatacaagaccagcacactcaataaaaatacaaccaaggaccctgcagagtccacttcactcccttgctacctccatcaaagcaggtgctggtatccatggctacaagacctgaagatgaatcacatcacagtactctttgcagatactcccaagtaccagtgcagagcctggtagctccactgggtgctagatccagaaaagcaaaaataatcactacatttcagctctcaggaaaccccattcctagggtaagggagagaacaccaaatcaaggcagcacactgtgggacaaaagaatctgaacagtagcccttgaatcccagatcttccctctgatgtagtctatccaaatgagaaggaatcagaaaaacaattctggtatatgacaaaacaaggttctttaacacccccaaaagatcataccagttagccagcaatggatccaaaccaagatgaaatctctgaattgccagaaaaatattttagaaggtcaattattaagctaatcaaggaggcaccagaggaaggtgaagtccaacttaaagacatcaaaaacataatacaagaaatgaaaaaagtttttcagtgaaatagatagcataaataaaaaaacagtcacaacttctggaaatcaaggacacacacaaatgcaaaatgcactggaaggtctcagcagtagaatcaaacaagcagaagaaagaacttgaagacaaggctttcaaattaacccagtccaccaaagacaaataaaaaagaattttaaaaaatgagtaaagcctccaagaagtttgggactatgttaaatgtccaaactaaaaataattagtgttcctgaggaaggagagaaatctaaaagtttggaaaacggatatttgagggaataattgaggaaaacctccc

SEQ ID NO: 4496 - DNA, 81 bp, Homo sapiens
  source 1..81: mol_type = other DNA
gaagatcagggatttattctcttcagagagtaatcagaaggttggtggactaggtgattccagggagagctgagggtggag

SEQ ID NO: 4497 - DNA, 44 bp, Homo sapiens
  source 1..44: mol_type = other DNA
ttgttcactgctagatcccagtgcctggaacagtgcctggcata

SEQ ID NO: 4498 - DNA, 159 bp, Homo sapiens
  source 1..159: mol_type = other DNA
taaagctgtagtaatttaaaaagtgttatattggcacaggaatagacatgagacattaaaataacaaaacagagagtccctaaatagaccaatatgtaaatgtcagagatctagcacatgataaaggtgatattttgaatcagtgggagaaggatggac

SEQ ID NO: 4499 - DNA, 303 bp, Homo sapiens
  source 1..303: mol_type = other DNA
gtcaggcctggtggctcatgcctataattccagcactttgggaggctgacgtgggaggactgcttgaggccagcagtttgagaccagcctgggcaacatagcaagactctgtctctacaaaaaaaaaaaaaaaaaaaaaaaaaaaaattagctgagtgttatggtgagcacttgtagtcctagctgctcggaaggctgaggtggaaggacctcttgagcgcaggagtttaggagttcaggctgcagtgagctatgattgcactactgcacatcagcctgggcaattgagccagtccctgcttc

SEQ ID NO: 4500 - DNA, 414 bp, Homo sapiens
  source 1..414: mol_type = other DNA
tattagtaaactgaattaggtagtgcattcacataaaatttaacatcaccaagaaggctttaccttaagaatgtaatgatgaatcaccattttagatagactgataggtaatttattaactgatttaaaagagaaaagacctatatcatctcagtgagtaccaaaaagcatttaataaaattcaatactcattcctaaagttccaagcaaactagaaagataaggaaaattcccacaaaactacagcaaacatcattcttgatggtgaagcattggctgcatttgcattaatgctcagaacaggaagaaaatacccaacaccacaaccatcagtaatctactagagttcttagtaattcagtaaaacgagaaaaagaaatgtgagatagaaaagaaaaagacaaaactgtcatt

SEQ ID NO: 4501 - DNA, 89 bp, Homo sapiens
  source 1..89: mol_type = other DNA
aacaatgtgagtgtgcttaacaccactgaactgtacacttaaaaatggtgaaagtgatgaatgttgtatgtattttatcataattaaaa

SEQ ID NO: 4502 - DNA, 245 bp, Homo sapiens
  source 1..245: mol_type = other DNA
agagggatgtgaaatactgggagatacttagaagggagtcaccacactaataaaatagttgttagacttatgagaaaggtgagagaactcaggttggagtagaatgagaattagaacactcttcaggttcctgatggtttttatgtgaaagacagtgagcagctggttattaccactgaggcaataaagagatactgtgggctttagcagaaacaccagtatatgtatttagtttttaaaataag

SEQ ID NO: 4503 - DNA, 310 bp, Homo sapiens
  source 1..310: mol_type = other DNA
ctgggcgtggtggctcactcccgtaatgccagcactttgggaggctgaggcaggcgatcacctgaggtcaggtgtttgagaccagcctggccaacacggcgaaaccccatctctactaaaaatacaaaaattagccgggcatggtggcgggcgcctgtaatcccagctactcgggaggctgaggcaaaagaattgcttgaacccgggaggcggaggttgcagtaagctgagatcatgccactgcactccagccggggcaaccagaacaagactccgtctcaaaaaataaaaaaaattaaaaaagaaaaaa

SEQ ID NO: 4504 - DNA, 302 bp, Homo sapiens
  source 1..302: mol_type = other DNA
ccaggcgcagtggctcacacctgtaatcccagcactttggcaggtcgaggctggcggatcacctaaggtcaggagttcgagaccagcctagccaacatggcggaactgtctctactaaaaatacagaaattagccaggtgtgatggcacacacctgtaatcccagctgcttgggaggctgaggcaggagaatcatttgaacctgggagacagaggttgcagtcagccgagatcacaccactgcacttcagccacctgggtgacagagcgagactctgtttcaaaaataaataaataaataaa

SEQ ID NO: 4505 - DNA, 1029 bp, Homo sapiens
  source 1..1029: mol_type = other DNA
tgtaggcaaaagaaagagcgatcagactcttactgtgtctatgtagaaaggaaagacataagagactccattttgaaaaaggcctgtactttcaacaatttctttgctgagatgttgttaatctgtagctttgccccagtcactttgaacaaaccactttgacccaacctgaagctcacaaaagcatgtgttgtatgaaatcaaggtttaagggatctagggctgtgcaggacgtgccttgttaacaagttgtttccaagcagtatacttggtaaaagtcatcgccattctctattctcaataaaccaggggcacaatacactgtggaaagcctcagggagctctgcccttgaaagcgccgtattgtccaaggtttctccccatgtgatagtctgaaaagtggcctcgtgggaggagaaagacctgaccatccctgagcccgacaccagtaaagggtctgtgctgaggtggattactcaaagaggaaatcctcttgcagttgagagagaggaaggccgctgtctcctgcctgcccctgggaactgaatgtctcggtataaaacccgattgtacatttgttcaattctgagatgggagaaaaaccgccctatggtaggaggtgagacatgttggcagcaatgctgccttgttattctttactccactgagatgtctggctggagagaaacataaatcttgcttagagacacgtccagtcatagtaccttcccttgaacttccttatgacttagactgtattgctcacatgttcgttgctgaccttctccttattatcaccctgccctcctactacattcctttttgctaaaataataaaaataataatcaataaaaactgagggaacccagaggcctgtgctggttcagatccttggtatgctgagcgccggtcccctaggcccactgttgtttctccatactttgtctctgtgtcttatttctttcctcagtctctcgtcccacccgactagaaatacccacaggtgtggaggggcaggccaccccttc

SEQ ID NO: 4506 - DNA, 1618 bp, Homo sapiens
  source 1..1618: mol_type = other DNA
gtacacctactgtgatattattcctaatatcctaaaaataaataggactcctaatatcacagttggtgtacacactgtgatatgagtcgtaatattccaacaggatgttactcctcaggtcacaggtggttaataccctgggacagtattcctcatattccagggcgctgatactcctaaagtcacagggtgtgtaccccctgtgatattattcctcctattcaagggggatgttactcctaatgtcacagggatgtacaccctgtgatattattcatagtataccagagggatattagtacgaatgtcacaatgcgtgtacatcttggcatatcattcgtattatcctaatgtcacagggggtgtgttccctgtgacattattcctaatatcctagacggctatttctcctaacattacagggtgtgtacaccttgtcatatcattcataatatcctaaaactacgttattcctcatgtcacagagggtgttcaccttgtgatattattcgtaattgttttgtgggatgttactcctaatgtcatacagggtgtacacagagtcacacagtgctatgacgtgtaatattatatagaaatgttactcgtaaatcacaggggctgtacctcctgtgatattattcgtcatattctaggggaatgttactattgtcacagggggtgtacaccctgtgacattactcgtcatatcctagcgggatgttactaccaatgtcacaatgcgtgtacaccctgtgatacgatttataatatcctagagacgttactaaggtcacaatgcatgtacaccctctgatattattcatcatatcctcgggggatgtcacttttaatgtcacatggggtgtactccctgtgatattattcataatatcctaagggcttgttacttttaatgtcaccaggggtgtatatcatgcatattcaacacctgtgatactattcctaatatcctaggggcatgttcctcctaatgtcacatggggtgtacaccatgtgtgtacacctgctgtggtattattcataatatcctaggggaatgttactcctgatggcacagacggtgtacaccgtgtgtgtacaccgcctgtcattactcgtaatatcctagggggatgtttctttcaatgtcacaaagggtgtacaaaatgtcacaaaatgtgttcaccttgtgacgttatctgtaataccctggaaggacgttactcctaataggtcacgggggtgtacaccttttgatattatttgtaatctcatagagagatatgacttgaaatatcagtggatgtacacacatagtgtataccctgtgatatgattcataatatcctagggagatacaactcctgatatcacagtgcgtgtaccccgggtgtgtacacccttgatgttaatcataatatccagggtaaagattactcctaagatcacacagtgggcataccctgtgataattttcatcatattatagggagatattgcttctaatatcacagtggttataccccttttgtgtatactgtgtgacagtattctttatatcctagggaggtattactcctaatatcacagtaggtgttcaccctgtgttatcatt

SEQ ID NO: 4507 - DNA, 308 bp, Homo sapiens
  source 1..308: mol_type = other DNA
ggccgggctcggtggctcaagcctgtaatcccagcactttgggaggctgaggcgggcggatcacgaggtcaggagatcgagaccatcctggctaacacaatgaaaccccgtcaatactaaaaatacaaaaaaattagccgggcgtggtggcgggcgcctgtagtcccagctactcgggaggctgaggcaggagaatggcgtgaacccgggaggcggagcttgcagtgagcggagatcgcaccactgcactccagcctgggcgacagagcgagactccgtctccaaaaaaaaaaaaaaaatagaaaaga

SEQ ID NO: 4508 - DNA, 317 bp, Homo sapiens
  source 1..317: mol_type = other DNA
ggctgggcgctgtaactcacgcctgtaatcccagcactttaggaggccgagatgggaggattacttggagccaggagttccagaccagcctgggcaacaaagcaagacccccgactctaccaaaaaaaaaaaaaaaaaaaaaaaaaaaatcgaaaaatgagccaggtgtggtggcacgcacctgtatttccagctactcaggaggctgaggccagaggatcgcttgtgattgaggctgcaggtgagctgtaattgggccactgcactacagcctgggtgacagagaccccatctccagaaaaagaaaaaaaaaaaaa

SEQ ID NO: 4509 - DNA, 304 bp, Homo sapiens
  source 1..304: mol_type = other DNA
ggccaggcgccgtggctcacgcctgtaatcccagcactttgggaggctgaggtgggcagatcacctaggtcaagagtttcaaaccagacgggccaacatggtgaaaccccatctctgctaaaaatacaaaaaaaaaaaaattagctgggcatggtggtgggtgcctgtaatcccagctactcgggaggctgaggcaggagaatcgtttgaacccgggaggcggaggctgcagtgagccgagatcatgccactgcactccagcctgggcgacagagactccatctcaaaaaaaaaaaaaaaaaaa

SEQ ID NO: 4510 - DNA, 238 bp, Homo sapiens
  source 1..238: mol_type = other DNA
cagtttagtggttgccagggtcccagggactggggatgggtggatgcggctagaaagggatagctccaaggaggctggggtggtggtgcagctggtcatcttgattgcaatggtggtgatatgaatttgtacatgggatcaaactgcatagactgctacacacacacacaccccacccacacgcagtgcacgcggagctagtgaaatctgactaagctctggattgcaccaatgtaaa

SEQ ID NO: 4511 - DNA, 145 bp, Homo sapiens
  source 1..145: mol_type = other DNA
aagttcctggttttgacatgccacagttatacaaaacactaaaattgggggaggctgagtgaagggtacacaggacctcccggtacatttctctcccatctcctgtgaatctatcattacttcaaaattaaaaaagaaaaaaaaa

SEQ ID NO: 4512 - DNA, 162 bp, Homo sapiens
  source 1..162: mol_type = other DNA
agtatagacagcagaaagatctctcgtctctgcagttgcaggcttggattcttgttcagctctaaaaaattattctgtgactttcaggtcaccttccctctctggtcctgtttcttctgtaaaatgagggcagtggattggctgattgccaaggtctctttc

SEQ ID NO: 4513 - DNA, 978 bp, Homo sapiens
  source 1..978: mol_type = other DNA
tgtgggtggcaagccacccaggtgccgaggcaagaaaccgagggcacgagctgttctagtataataaaataaataaaataagaatagttatactagatatagatcttagatatgattatatatgaatatcattaatccttagtttgtagcaattactctttattccaatattataataatcctcactcgacaatcataacctaggaaacaccaggctatacagagatgggagctgaggggacatagtgagaactgaccagaaaacgagtgcaagccttctgttatgcccggacagggccaccagagggctccttggtctagcggtaacgccagcatctgggaagatgcccgttgccaagcggaccttggtctagcagtagcgttagtgtcaaggaaaaacacccgctacttagcagaccgggaaagggaatctccctttccccgggggagtttagagaagactctactcctccacctcttgtggagggcctgacatcagtcaggcccgcccgcagttatccagaggcctaactatctccctgtgatgctgtgctttggtggtcacgctcctagtccgccttcatgttccatcctgtacacctggctctgccttttagataacaatagcaaattagtgaaagtactaaaagtctctgataagcagaaataatggcataagctgtctctctctctctgccttggtgccaggcaggcaagggcccgctttccagtggacacgtgacccatgtggccttacctatcattggagatggttcacactgcttatcctgcccctttgtcttgtatccaataaatatcagtgcagcctggcatttggggccactaccggtctccgcgtcttggtgggattcccaggctcagctgtcttttatctctttgtcttgtgtctttatttctacgctctctcgtctccacacacggggagaaacccaccgaccctgtggggctggaccctac

SEQ ID NO: 4514 - DNA, 2741 bp, Homo sapiens
  source 1..2741: mol_type = other DNA
aagcttgtccaacttgtggcctgcaggcctcatgcagtccaggatggctttgaatgtatcccaatacaaatgtggaaactttcttaaaacattttgagtttttttgcaattttttttgtaattttgtaatttgactatgtgattctcaagtgtgaacttcgtagacaacaatggaatggaaaggggtaatcagagtatgtcacatccacaaataatggactagtatccataatttgcattataattgcaaacagttcagcaagaagaaattaaaagccattaaaattaactaacaaagagcgagaggacgctattgcagtgccacgtgaagtgaattgtgacaaagaattcaagtgtgtattctggacaaggcagagcgctgctgtacaccagacactgtcgccatttgtacgcatgtgtggcttcagttttatggtggtgtgcgacttccagtgtgttatcttctaatcacggacagttgaattgacactgtcaggtattaggtgtgtttgtggcaatttggcaagtaaaacccagcaattatcaataatatttcaacctacctttgtagatgataggtgtttaatattatttagaagacatgtaagtattcttatttgattattaaaccttgctttctgttctattttcctatctgttaatttccataataaaagtaaatatagttgcttatctattataatgcttttaattccagaatggcttccacaatgtcttaaaaagaaaaccctaaaaaacaaaaattatggatgaaggaagattgttcaatgaaaagtggacaaatgactttttcttgttgaggcaaatagcgaagcactctgcttaatttccacggaatttgtgccagttttcaaagactacaatttgaagaggcattatatgcaaaaacgtgctgacaaatttggtgtgtatgtgttgtaaggacaaaatagcagaactgaaaaaaagtctgtcttttcaacaaaaaagattttttaaaaagttacaactcggactcaatcgtaaggtaaaacctagttatgtggtagcaaatttaatagcaaaaaaatcaaaaccatttactgatggtgagtttattaagcaatgtctggaagatgtggtagatattatttgccttgagaaactgatatttctaaaatcagtttgtctcaccagactatagccaggagaattggagaaattgggaaatctattgaaagacgtttggagagtaaaactgctaatttaaaattttatgctttggtgatggatgaaggcactgacactacagatacggcacaacttgctatttttattagaggtattgatgatgaatataatgtcactgaagaaatcgaaatgtcaccatgctattaaaagacacaactaaatcaagagatttatatgaagcagtgaaaaatatgttaaagcaattttctttgtcctttgtaaacatatgtgatatagctacagatgctgccctggcgatggtaggtaaaagagagggacttgtacaattaatagatgatgcagttgccacacaaaactcacatttgatgaagtattattgcataatacatcaagaaaatccatgtgcacaagctttaaaagtagataacgtcatgcaaattgtcatcaaggctgtaaatttcacaagggcccaggaattgaatcatcgctagtttcaggaattccttaaaagtatggatgctgactctagcaagtcattcactttttagaagtaagatggttaagtcaaggcaaaatgtaaagattttatgctttgtgatgtgaaatcaagctgtttatggtatcaaacaaaattggtgccagaacttgacaatgaaaactggcttacagatttagcatttttagtgggtttgacggcccatttaagtgagttaaacctgtgtcttcaagttgaaaaccaacttaacaatacaatgtttcaaaccataacagcattccatatgaaactgaaattatggcaagctcaaattaaggcaaacaattttatgcatttcgacatgttggctaaacatggtcctgtgaacagccaaaaatacgcagccttgcttttcaatttgatacaggaatttgaaaacaggtatttcaagatttctgaaaaaatcatcaatattttggtatatttgcaactccattttcagtcgacatatatatgttacctggcaattttgaaatggaatgcctagagctgcaatctgatgttcaacttatagaaaaatttgattttgcctctttactggacttttgtaagacctgtcttcccaatgacaaatatcccttgcttcacaatcacaccttgttcatgtcattgctttttggcagcacttacatttgtgagctactattttcaaggatgaagaacacgaagagtaaaattagaaccaaaatatctgatgagcaccttgagaactcactgagaattgcaactacttccatcaagccagatactgatggattagtttctcaaaaacaatgtcaagtaccccactagttttatgttgttctcttttcttttataataaaaaatatcaaaaaagtagtgaagtttagctagatatgtacattttctgtatcagtgattgcaaacttggaacctgttcaatgattttgaaagaccctctgaatggggcagtgcataattaggattattatgcaaggacatttttgcttatctgtggtggtagatatataatgaaaactatacacagaccatt

SEQ ID NO: 4515 - DNA, 186 bp, Homo sapiens
  source 1..186: mol_type = other DNA
gaactggattttaatcccaacactgccatttaccagctggccaatactgagctagttactctaaagagttcagttttctcatttgtacaaataggatttgactttccatctcactgagttgtgatgagagtcatatgcaacagcatatgaagaggctagcaaaagatatttaacaagcgttcaaca

SEQ ID NO: 4516 - DNA, 87 bp, Homo sapiens
  source 1..87: mol_type = other DNA
cttcttgttatatgagataattacgcccttattgtataagacaattttagttgtatttggttacttgcagcctgaagtaccgtaact

SEQ ID NO: 4517 - DNA, 306 bp, Homo sapiens
  source 1..306: mol_type = other DNA
gccaggtgcggtggctcacgcctgtaatcccagcactttgggaggccgaggtgagcggatcacctgaggtcaggagttttgagaccagcctggccaacatggtaaaatcccgtctctactaaaattataaaaattagccgggcatgatggtgggcacctgtaatcccagctacttgggaggctgaggcaggagaatcacttgaacccaggaggcagaggttgcagtgagccaagattgcacactgcactccagcctgggtgactagcaaaactccatctcaaaaaaaaaaaaaagaaagaaagaaa

SEQ ID NO: 4518 - DNA, 295 bp, Homo sapiens
  source 1..295: mol_type = other DNA
gccgggcgccgtggctcacgcctgtaatcgcagcactttgggaggccgaggcaggcggatcacgaggtcagtagttcgagaccagcctggccaacatggtgaaaccttgtctctactaaaaatacaaaaaaaaattagctgggcacagtggcgcacgcctgtagtcccagctactcgggaggctgaggcaggagaatggcttgaacctgcgaggcggaggttgcagtgagctaagatcatgccactggcactccagccttgagtgacagagcgaggctctgtatcaaaaaaaaaa

SEQ ID NO: 4519 - DNA, 294 bp, Homo sapiens
  source 1..294: mol_type = other DNA
gctgggcacagtggctcaggcctgtaatcccagcactttgggagaccaaggcgggtggatcacaaggtcaggagatcgagaccatcctggctaacatggcgaaaccccgtctctactaaaaatacaaaaaaatagctgggcgtggtggcgggcgcctgtagtcccagctactcaggaggctgaggcaggaggatcacttgaacatgggaggcggaggttgcagtgagccaagatggcgccactgcactccagcctgggtgatggcgtgagactccatgtcaaaaaaaaaaaaaa

SEQ ID NO: 4520 - DNA, 305 bp, Homo sapiens
  source 1..305: mol_type = other DNA
gccaggcacggtggctcactcctgtaatctcagcactttgggaggcagaggtgggcggatcacttgaggtcaggagtttgagaccagcctggccaacgtggtgaaagcctgtctctactaaaaatacaaaaattagccgggcgtggtggtgggcgcctgtagtcccagctactcaggaggctgaggcaggagaatcacctaaatctgggaggcagaggttgcagtgagccgagattgcaccactgcactccagcctgggtaacagagactctgtctcaaaaaaagaaaaaaaaaaaagaaagaaa

SEQ ID NO: 4521 - DNA, 105 bp, Homo sapiens
  source 1..105: mol_type = other DNA
agcagtggcactggagctgtgggctttggggaagtcacttagctccttaaggtctgtttttagacccttccaaggaagaggccagaacggacattctctgcgatc

SEQ ID NO: 4522 - DNA, 293 bp, Homo sapiens
  source 1..293: mol_type = other DNA
gccggacgcggtggctcaagcctgtaatcccagcactttgggaggccgaggcgggcggatcacgaggtcaggagtttgagaccagcctggccaatatggtgaaaccctatctctactaaaaacacaaaaatagccgggcgtggtggtgggcgcctgtaatcccagctactcgcgaggctgaggcaggagaattgcttgaacacgggaggcggaagttgtattgagccagagatcgcgccattgcactgcaacctgggcgaccgagtgagactccgactcaaaaaaaaaaaaaa

SEQ ID NO: 4523 - DNA, 329 bp, Homo sapiens
  source 1..329: mol_type = other DNA
atggactgaatatctgtgtccccctaaacccacatattgaaatccttcccccagtgtgatgctgtttggaagtggggcctttgggaggtgattgggtcataggggtgcagccctcatggatggatgaatgcccttctaagcccaggccagagggctagcttgctgtttctcctccaggtgaggatacaactagaagccagcagtctacaggctggaagaaggccctcaccagaacccaacccttggacttcagcctccagaactgtgagaaatacatacctgctgtttgtaagacaccagtctatggaattctgttacagtagcctgaa

SEQ ID NO: 4524 - DNA, 312 bp, Homo sapiens
  source 1..312: mol_type = other DNA
gccaggtgcggtagctcacccctgtaacaccaacactttgggaggccgaggcgggcagatcacctgaggtcagcagttcaagaccagcctggccaacatggtgaaaccccatctctactaaaagtacaaaaattagccaggcggtagtggtgtgtgcctataatcccagctactcgggaggctgagacaggagaatcgcttgagcctgggaggaagagggtgcagtgagccgagatcgtgctactgcactccagtctgggtgagagagtgagacgctgtctcaaaaaaaaaaaaaaaaaaagaagaagaaaa

SEQ ID NO: 4525 - DNA, 337 bp, Homo sapiens
  source 1..337: mol_type = other DNA
gccaggcgctgtggctcccgcctgagatcccagcacgttgggaggctgaggcaagaggattgcttgaactcaggacttcgaggctgcagtgagctatgactgcaccactgcactccagcctgagtgacagagcaaaactctgcgtcaaaagaaaaaccaaggctgggcacagtagctcatgcctgtagttccagctactcgggaggctgagacaggagaatcgcttgagcctgggaggaagagggtgcagtgagccgagatcgtgctactgcactccagtctgggtgagagagtgagacgctgtctcaaaaaaaaaaaaaaaaaagaagaaaaaaaa

SEQ ID NO: 4526 - DNA, 337 bp, Homo sapiens
  source 1..337: mol_type = other DNA
gccaggcgctgtggctcccgcctgagatcccagcacgttgggaggctgaggcaagaggattgcttgaactcaggactttgaggctgcagtgagctatgactgcaccactgcactccagcctgggtgacagagcaaaactctgcgtcaaaagaaaaaccaaggctgggcacagtagctcatgcctgtagttccagctactcgggaggctgagacaggagaatcgcttgagcctgggaggaagagggtgcagtgagccgagatcgtgctactgcactccagtctgggtgagagagtgagacgctgtctcaaaaaaaaaaaaaaaaaaagaagaagaaaa

SEQ ID NO: 4527 - DNA, 337 bp, Homo sapiens
  source 1..337: mol_type = other DNA
gccaggcgctgtggctcccgcctgagatcccagcacgttgggaggctgaggcaagaggattgcttgaactcaggactttgaggctgcagtgagctatgactgcaccactgcactccagcctgggtgacagagcaaaactctgcgtcaaaagaaaagccaaggctgggcacagtagctcatgcctgtagttccagctactcgggaggctgagacaggagaatcgcttgagcctgggaggaagagggtgcagtgagccaagatcgtgctactgcactccagtctgggtgagagagtgagacgctgtctcaaaaaaaaaaaaaaaaaaagaagaagagaa

SEQ ID NO: 4528 - DNA, 335 bp, Homo sapiens
  source 1..335: mol_type = other DNA
gccaggcgctgtggctcccgcctgagatcccagcacgttgggaggctgaggcaagaggattgcttgaactcaggactttgaggctgcagtgagctatgactgcaccactgcactccagcctgggtgacagagcaaaactctgcgtcaaaagaaaaaccaaggctgggcacagtagctcatgcctgtagttccagctactcgggaggctgagacaggagaatcgcttgagcctgggaggaagagggtgcagtgagccgagatcgtgctactgcactccagtctgggtgagagagtgagacgctgtctcaaaaaaaaaaaaaaaaaaaaaagaagaa

SEQ ID NO: 4529 - DNA, 339 bp, Homo sapiens
  source 1..339: mol_type = other DNA
gccaggcgctgtggctcccgcctgagatcccagcacgttgggaggctgaggcaagagaattgcttgaactcaggactttgaggctgcagtgagctatgactgcaccactgcactccagcctgggtgacagagcaaaactctgcgtcaaaagaaaaaccaaggctgggcacagtagctcatgcctgtagttccagctactcgggaggctgagacaggagaattgcttaaacccaggaggcagaggttgcagtgagccaagatcaggccaatgcattccagcctggcccacagagcaagactctgtctcaaaataaattaataaataaataaaaataaaaa

SEQ ID NO: 4530 - DNA, 386 bp, Homo sapiens
  source 1..386: mol_type = other DNA
tgatatggttcagctccgtatccccacccaaatctcatgtcaaattgcaattcccagtgttgagggagggacctggtaggaggtgattggctcatggcggctgacgtcccccttgctgttctcatgatagtgagtgagcgctcatgggatctggttgtttagaagcatgcaccacctcccgcttcactctctctgtctctcctgctccaccatggccagaaacgtgcctgcttccccttcgccttctgccgtgattgtcagtttcctgaggcctccccagccatgcttcctgtacagcctgcagaactgtgagtcaattaaacctgttttcttcataaattccccagtttccagtagttctttatagcagtgtgaaaacagactaa

SEQ ID NO: 4531 - DNA, 300 bp, Homo sapiens
  source 1..300: mol_type = other DNA
gaccaggtgcggtggctcacacctataatcccatcactttgggaggccaaggcaagtggatcatgaggtcaggagttcacgaccagcctggccaacatggtgaaatcccatttctactaaaaatacaaaaattagctgggcgtggtggcaggcgcctgtaatcctagctacttgggaggctgaggcaggagaatcgctggaacccaggagacagaggttgcagtgagctgagattgcaccactgcagtctagcctgggtgacacagcaagactccatctcaaaaaaaaaaaagaaaaaaa

SEQ ID NO: 4532 - DNA, 545 bp, Homo sapiens
  source 1..545: mol_type = other DNA
tgaaagaaaccaaaatatttaacctcagaataggtttctttgccatattttgggacggttctgtaggcagctgtgggcctgcaacatggtcttcagtcagggaaatccgcctctgcagaggagacagtggagtagacagcggatgcacacagcctttctctgcagtccccgtgtctggatctaggaaagacaaactgagaggcggacccctttaagggtctgaaggacttgcctaccacaggctccgcagagtaccagctgtgagatgtcacctgcagaacaagacctttgctagccaagtctctcctctccccttcccctaatctgtcttgctgcgctccaggcctcccgttatttctgtaatttcaagatgggtataaaagtgtcaaccatctggccatttatttttttatatattttgtatgacttgtgcacatgtgtgcacgtagtaacatttttaagtcggttttttttcctgttaatgttttatgtttgtttcatagactcagattatcaaaccttcagggaaaaaatttaaacttccc

SEQ ID NO: 4533 - DNA, 67 bp, Homo sapiens
  source 1..67: mol_type = other DNA
tgagtccaggagttcaagaccagcctgggcaacatggtgagaccctatcgctacaaaaaaaaaaaaa

SEQ ID NO: 4534 - DNA, 106 bp, Homo sapiens
  source 1..106: mol_type = other DNA
tgctttccccttgagatcaggaatgaggcacagatgtctgctctcactgcctcccttcacggtactggagtcctagccagcgcgctatgcctgaagggaaatacaa

SEQ ID NO: 4535 - DNA, 336 bp, Homo sapiens
  source 1..336: mol_type = other DNA
ccctcctgcaggtagcagggcgccaagcagtgacttctgaccaacagagtgtggggagaagggatgtgtattagccccggaggacgtgatgtgagacccgcttgtgagtcctccacactcgttccccattggcaagatacatggagagcaccctgaggacctttaaaaggcaaagccgcaaggcagaaggaggctgggtccctgaatcaccgactggaggagagttacctacaagagccttcatccaggagcatccacactgcaatgatataggaatgaggtctgaactccactgaattaaaccactggcatttgggggctgtttattatagcagt

SEQ ID NO: 4536 - DNA, 431 bp, Homo sapiens
  source 1..431: mol_type = other DNA
ggttctcagagtgcttctcgggggcccacaatgtcaatggtacgctcataataatactaagatgctatttgcctttttactctcattctgttacaggtgtacagtagagttttccagaggctacatgacatgcagtatcacaacggaagcaaatataagaacccacctgtctcctgttaaaatgcaaaatgtaaaacaataccactttgctaactgtttttgtttggggaaatatagttcataaaaatatttatgttaacatgtaatttaggttaaaataaattaataaatatttgtaaattgtctgttttaatttctaatatggtaaatacagatagatataacccatataaacaaaacctgtttggggtcctcaataatattgaagagtgttatacaggggtcctaaggccaaagaatttgataatgct

SEQ ID NO: 4537 - DNA, 136 bp, Homo sapiens
  source 1..136: mol_type = other DNA
attcatttgtaactgctgctaatcggagtgtatattcagggcagctccaatcaatgcttccaggtggccattctcaagtttgtggcttaaataaactctgtacttaatcatattttctgaatctcttaaggttagc

SEQ ID NO: 4538 - DNA, 327 bp, Homo sapiens
  source 1..327: mol_type = other DNA
cagtagtgcccccctcatccaaagtttccctttctgtggttttggttacctgtagtcaaccacattctaaaataggtgagtactgtacaagaagatattttgaaagcaagagagaccaaccacattcacataacttttattatagtatgttatcattgttctattacattattattaatctcttgctatgcttaatttatacattatactttatcataggtatatatatatggaaaaaacagtgtataaaggtttggtactgtttgaggtttcaggagttcactgggggccttggaatgtatctcccgaagataagggggaactact

SEQ ID NO: 4539 - DNA, 69 bp, Homo sapiens
  source 1..69: mol_type = other DNA
aaatttatttaatcagaacttcagagggttctagaaacctgcatttttaacaaggactgcagatgattc

SEQ ID NO: 4540 - DNA, 317 bp, Homo sapiens
  source 1..317: mol_type = other DNA
caacctaagaacaaatgtaaaagtaaagatgcaggaaaaatgaattgcttggtattcattacttcatgtatatcaagcacagcagtaaaacaaaaacccatgtatttaacttttttttaggatttttgcttttgtgatttttttttttttgatacttgcctaacatgcatgtgctgtaaaaatagttaacagggaaataacttgagatgatggctagctttgtttaatgtcttatgaaattttcatgaacaatccaagcataattgttaagaacacgtgtattaaattcatgtaagtggaataaaagttttatgaat

SEQ ID NO: 4541 - DNA, 177 bp, Homo sapiens
  source 1..177: mol_type = other DNA
agtggagcatggtggcccgcgcctgtagtcccagctactcgggaggctgaggtgggagaatcgcttgaggccgggaggtgaaggttgcggtaagccgagatcgcgccattgcactccatcctgggcgactgagtgagaccctgcctaaaaaaaaaaaaaaacaaaaaaagaaaaaaa

SEQ ID NO: 4542 - DNA, 508 bp, Homo sapiens
  source 1..508: mol_type = other DNA
tttttgtattttcagtgttttgtatttatggtgtttgatatctgggaccttgttgatcctagagtgtctgcccatcccagggctggacagttcctagacagagtaaaagactcgtctgcaagtgcacttttcatatgcaacccaaccaatgcaaagcgactacccaccaaatacctcctttattgtgctctctctcccctaatcaccagagccaggtgccaggcaactggcagccatctctatcctccagagcctgctgaattatccacactagccaatcctcagcctgtggagcctgcctcacccattccttcctgcaaagcccacagtaaagactctgcctgcatgctcttgcctgctccttctgcctctggtgcttccccatgtggttctgcatgctcctcctccaggaaactgtgagtaacaaactctcttttcaatggcagttgtcttctgatctgttggctttaccacacataaataataataatgcttccattttataaca

SEQ ID NO: 4543 - DNA, 280 bp, Homo sapiens
  source 1..280: mol_type = other DNA
gttcacgcctgtaattccagaactttgagagaccaagatgggcagatcttgagctcaggagatcaagactagcctgggcaacctgtcaaaacccagtctccacaaaaaaataattagctgggcatggtggtgcatgcctgtagtcccagctacttgagaggctgaggtaggagaatggcttgagcccaggaggcggaggctgcaataagccaaaatcatgccactgcattccaacccgggtgacagagccagatcctgtctcaaaaaaaaaaaaaaaaaa

SEQ ID NO: 4544 - DNA, 94 bp, Homo sapiens
  source 1..94: mol_type = other DNA
aatatgttaccattgaaggaagttgggtgatggatccatggtacccctctgtaccaattttgcatcttcttttgagtctgtaattatttcaaaa

SEQ ID NO: 4545 - DNA, 171 bp, Homo sapiens
  source 1..171: mol_type = other DNA
agaaaaacaagctaggtgcagtggcactcacctgtaatcctagctacttgtctgtaatcccagctactcaggaagctgaggcaagagggttgcttgagcccaggagttcaagatcagcctaggcaacacagcaagaccctgtctcaaaaaaaaagaaaggtagaaaaacaa

SEQ ID NO: 4546 - DNA, 953 bp, Homo sapiens
  source 1..953: mol_type = other DNA
catctggtggaaaactgatcacagttgacccattccctcatggagtagtcagcaattttccatcacagtagtagatatttatttattctgtctatggatgtgtctccgaggcccacaaggcctttgctgcctcatcacacaaaacttccccaaatgcctgattattcatcacaatggttttgcatttggcattacttcttacaaactgattaaaacgcgacagattaaaatgcaacagacctgaagcaatgcactcggtgcccatgggattcacggatcttcccataggtcctaccagccagaagcagcatgcctgattgatagaacagtggaatggcccaatgaaggttatgcaactgagcctgttgagatctcatgacatgtgaggatggagtgctcttttacaaagtactgtgtctattatgaagcacattcaataggagctgattcttgtatggccagaatacttgggtttgggaaccaagggataagagtgggactggcttcatttactattgcacgtagtgatccacacccaataaagttctgcttcttaccactgcaactttgagctctggaagtttagagaccttagttcccaagggaagaatgtctctaccagggaatacgatggtttattgcatggagagttgagactgccacctggacatttggagttcattacaccactaagccaataggcaaaggggaaggttagtgtcctggctgagaagactgacccctaatatcaaagaacagagatttgctccacacatggggacaaggaggaatatgtctgaaatccattacatcctttgaagatgctctttctatttcattgtccaaagggagaaatcagtggaaaactacagcaacgccatacaggaaaaaccatcaagtgctcagaaatgaatggtcaccccaacaaataaagaacaacgatcagctgaggt

SEQ ID NO: 4547 - DNA, 673 bp, Homo sapiens
  source 1..673: mol_type = other DNA
aaagagctaacaagggccaaaggtgggacaaatgagtcacaaaataattaagtatagtgttacaactcaaagaatgagataaatattcaagtccatgctgacatttaaaaaaactgaataaatggagaagaaacaactcttacagaattccaacttaataaataatgaggaaattagcatatcacagtaataattgccccaggcaacatttccataaggacactaaaataaatggggaaaagtgtaagcagaaacaggttatttgcataatcttaaagtatgtccctctacatatttaataattataagtagaaaaatggtaaatttacagtggaaaattccaacagatatcaccctagccaaagtgagtgaggttagcagcatcaggagtgcatatggacaccatgttttcgtaggtaagatgtgctgagaagggtattatcactctggggcatctttcccacataccccatagcctcaatctaatcatgaataaacatcagacaaacccacattaagggacattctgcaaaataactgacaagtaatgttcaaatgacaggactgaggaactactacagattggaggaggctgcagagacatgacaactaaatgcaatttgagatcctggattaggtcctgtaataggaaaaagtagaaaagctagtaaaa

SEQ ID NO: 4548 - DNA, 155 bp, Homo sapiens
  source 1..155: mol_type = other DNA
aaggaagccagctgccatgttctgagtactctctggaagggcctgcatggcaaggaactgatgtttccagccagcagccagcaagaactgcaagccttgtgaatgagcttggaagcagatcctcccctcactcaagccatgatatgacaacagcc

SEQ ID NO: 4549 - DNA, 119 bp, Homo sapiens
  source 1..119: mol_type = other DNA
taagacacttaccctctttgtgccacagttctcctataaaatacacccccagagtgttgaggtgcacactgaattctgtaatgtaatgtatgctgaggactcggccagtgcttgataca

SEQ ID NO: 4550 - DNA, 60 bp, Homo sapiens
  source 1..60: mol_type = other DNA
atccctcaacatctgcatagtacctggcacaggatggacatttaatgttttgtgaataaa

SEQ ID NO: 4551 - DNA, 2373 bp, Homo sapiens
  source 1..2373: mol_type = other DNA
gctggcaaggtggcctaataggaaaactctggtctttagctcccagtgagatcaacgcagaaggtgggtgattttgcatttccactgaggtaccaggcttatctcattgggactggttaaacagtgggtgcagctcatggagggagagctgaagcagggtggggcgttgtttctcctgggaagtgcaagggttcagggaactccctcccctagccaagggaagctgtgaaggactgtgccatgaggaactgtgcattccaccccagttcctacacttttcccaaggtcttctcaacccgcagaccaggagattcccttgggtgcctgtaccaccagggccctgggtttcaagcacaaaactgggcggccatttgggcagacaccgagctagctgcaggagtttttcttcataccccagtggctcctggaacaccagcaagatagaaccattcactcccctacaaggggggctgaagccagggagccaagtggtgtagcccagcggatcccactgccacagagcccagcaagctaagattgattgggttgaaattctcactgccagcacagcagtctgaagttgacctgggacactcgagcttggtggggagaggggagtccaccatcattgagggtttagtaggcggttttcccctcatagtgtaaacaaagctgcctggaagttcgaactgagtcaagcccactgcagctctgcaaagccacagtagccagactgcctctctagattcctcctctcggggcagggcatctctgaaagaaaggcagctgccccagtcaggagtttatagataaaactcccatctccctgggacagagcacctgggggaaggggcagctgtggttgcagcttcagcagacttaaatattcctgcctgctggctctgaggacagcagtggatctcccagcacagttctcgagctctgctaagggacagactgcctcctcaattggtctctgacccctgtgcctcctgactaggagacactcccagctggggtcgacagacacttcatacaggagagctctggctgggatatggcaggtgcccctctggaatgaagcttccagaggaaggaacaggcagcaatctttgctgttctgcagccactgcgggtgaggcaaacagcgtctggagtggacctccagcaaattccaccagacctgcagcagaggggcctgactgttagaaggaaaactaacaaacagaaaggaatagcatcaacatcaacaaaaaggatgtccacacagaaaccgcattcgaaggtcaccaacatcaaagaccaaaggtagataaatccatgaaggtgtggaaaaccagcacaaaaaggttgaaaattccaaaaaccagaatgcctcttctcctccaaaggatcacaactcctcgccagcaagggaacaaaactggatggagaatgagtttgacgaattgacataagtaggcgtcagaaggtgggtaataacaaacccttctgagctaaaggagcatattcttacccaatgcaaggaaactaagaacctggaaaaaaggatagaggaattgctaactagaatatccagtttagagaagaacataaatgacgtgatggagctgaaaaacacagcatgagaactttgtgatgcatatacaagtatcaatagctgaactgatcaagtggaagaaaggatatcagaggttgaagatcaacttaatgaaataaagcatgaagacacgattagagaaaaaatcatgaaaaggaaagaacaaagcctccaagaaatataggactatgtgaaaagaccaaacctagtttgagtggtgtacctgaaagtgatggggacaaacgaaccaagttggaaaacactctttaggatgttatacaggagaactccaacctagcaaaacaggccaacattcaaattcaggaaatacagagaacaccacaaagatattcctcaagaaaagcaacctcaagacacatattcatcagattcaccaaggttgaaatgaaggaaaaaatgttaagggcaaccagagagaaaggtcaggttacccacaaagggaagcccatcagactaacagcaggtctctctgtggaaatcctacaagccagaagagagtgggggccaatattcaacattcttaaagaaaagaatattcaacccagaatttcatatctagccaaactaagcttcataaatgaaggagaaataaaatcctttacagacaagcaaatgctgagagacttttaccaccaccaggcctgccttacaagagctcctgaaggaagcactaaatatgggattgaaaaccagtaccagccactgcaaaagcataccaaattgtaaagactattgacactatgaagaaactg

SEQ ID NO: 4552 - DNA, 227 bp, Homo sapiens
  source 1..227: mol_type = other DNA
caaatcctttctcagttgattatatttgtaaactcttcttctactctgtcttctgctcccagtgcacattgctggtactttcagcagctctcactgtctctctcctgaataaatcaagagactcttgaccagtctcttgcttctaattgctccttcctccgctccgttattcacacagctgccagattcatagctctaaaaggccagcttgttcatgcctttcctct

SEQ ID NO: 4553 - DNA, 309 bp, Homo sapiens
  source 1..309: mol_type = other DNA
gctgggcgcggtggctcacacccgtggtcccaacattttgggagaccaaggtgggaggaatgcttgagttgtaggagttcaaaccagcctggcaaatatggcaagaccccatctctctaaaaagtaaacaaaaatcagccgagcatcatatcacatgcctgtagtcccagctactctggaggctgagatgaagactgcttgagccagggagggcaaggctgccgtgagccaagatcacaccaccacaccctagccagggagacagagcaagactctctctcaaaacaaacaaccaaaaaaaaaaaaaaa

SEQ ID NO: 4554 - DNA, 1596 bp, Homo sapiens
  source 1..1596: mol_type = other DNA
gtaaattggtaccagtagagtggggcactgctgtaaagacactgaaaaatgtggaagaaactttggaactgggtaacaggcagaggttggaacagtttggaaggctcagaagacaggaagatgtgggaaactttggaacttcctagagacttgttgaatggctttgagtaacatgctgatagtgatatggacaatgaagtccaggcttagctgatctcagatggagatgaggaacttgttgggaattggaataagggtgactcttgctgtgttttagcaaagagactggtggcatttgccccagccctagagatctgtggaactttgaccttgagagagatgatttagggtatctggtggaagaaatttctaagcagcaaagcattcaagaggtgacttgggtgttgttaaaagcattcagttttatgtagtcacaaagacatggtttggaattggcacttatgtttaaaagggaagagagcataaaagttcagaaaatttgcagcctgacaatgcaatacaaaaggaaaaccaattttctgaggggaaattcaagcctcctgcagaaatttgcataagtaacaaggaggcaaattttaattgctgagacaatggggaaaatgtctccagggtatgtcagaggccttcacagcagcccctccatcacaggcccagaggcctaggaagaaaaaatggtttcctgggctggacccagggccttgctgctttgtgcagtctcaagacttgctgacctgtgtttcagctgtggcttaaaggggccaacttagagctcaggctgttgcttcagagggtgcaagccccaagacttggtggcttccacgtggtgttgggcctgaaggttcacagaagtcaagaattgaggtttgggaacattggcctagattacagaggatgtgtggaaatgcatggatgttcaggcacatgttttctgcagtggttgagccctcattgagaacctctgctagggcaatgcagaagggaaatgtgcggtaggagcccccccacaaagagttccccaatgaggctgcctagtggagctgtgagaaaaaggccatcgtcctctagaccccagaatggtagatccactgacagcttgcaccagttgcctagaaaaactgcagacactcagtgccagaccatgaaggcagctgggagcagagctgtaccctgcaaaccacaggggtggagctgcccaaggccatgggagcccacctcttgcatcagcatgacctacttgtgacacatggagtcaaaagagatcatttcagagcattgatatttggctgccctagtggatttcggacttgcatggggcctgtaattttgttttggccaatttcttccattttgaacacgtgtatatacccaatggctacacctccattgtatctaggaagtaactagcttgcttttgattttacaggcttgtaggcagaagggacttgccttgtttcagatgagactttggacttggacttttgggttaatgctggataagacattggggaactgttgggaagtcatgattgtgttttgaaatgtgagggcatgagatttgggaggggtcagggcaga

SEQ ID NO: 4555 - DNA, 342 bp, Homo sapiens
  source 1..342: mol_type = other DNA
gccaggtgtggtggctcacacctgtaatcctagcaccttgggaagcaaaggtagggggatcacttgagcccaggaattcaagactagcctaagtaacacagggataccctgtctctacaaaaaaaaaaaaaaaaaagaaagaaagaaaaaaaaaaagaaaattagccatgtgtggtggcacacacctgtagtcccagctactctggaggctgaggtgggaggatcacttgagcccaggaggttgaggctgcggtgaaccaagattgtgccactgcactccagtctgggcaacagagagagaccttgtctcaaaaacaaatgaacaaacaaaaaaacaagaaa

SEQ ID NO: 4556 - DNA, 281 bp, Homo sapiens
  source 1..281: mol_type = other DNA
tggtggctcatgcctgtaaccccaacactttgggatgccaaggcaggaataccacttaagaccaggagtttgagaccagcccgggcaacacagggagatcccatctctaaaaaaataaaataaaaaattagcagggtgtggtggcacacgtcctgctggcactccagaggccgaggtgggaggattgcttgaccctgggaagtcaaggctgcagtgagccatgacagtgccactgtcatccagcctgggcaacagagcaagaccgtgtcttgaaaaaaaaa

SEQ ID NO: 4557 - DNA, 302 bp, Homo sapiens
  source 1..302: mol_type = other DNA
ggccaggcgcggtggctcatgcctgtaatcccagcactttgggaggccgacgtgagcgaatcacgaggttaggagttcaagaccagcctggccaacatggtgaaaccctgtctctaatgaaaatacaaaaagttagctgggcttagtggcaggcacctgtaatcccagctactctggagtctgaggcaggacaatcacttgaacccaggaggcggaggttgcagtgagctgagatcggaccactgcactacagcccaggtgacagagtgagactctgtctcaggaaaaaaaaaaaaaaaaaa

SEQ ID NO: 4558 - DNA, 2162 bp, Homo sapiens
  source 1..2162: mol_type = other DNA
aaggatatacaaaataaccagaaaacaatgaacaaaatgacaggaataaatcctcgcctatcaataataacttcgaatatgggttaaattacctacctaaaagatacagtcaggcttaatggataaaaagtgacccaacatcacttcccttgtaaagacacacacagactgaaagtgaagggatggaaaaagatataccacacaaacagaaatcaaaaataatcaggagtagctaaacttacatcagataaaacagactttaagtcaaaaactgtaaaaaggacaaacaagatcattatatggtaataaagggatcaattcagcaacaaagtataacaattccaaatatgcatgcaaccaacacaagcgcatccagagacatatagcaaatattattaaatctacatggagagatagagtccaataaaatgatagttgagaacttcaatatcctactctcagcattggacagttcatctagacataaaatcaacaaagaaacattagatttaagctgcactttggaccaaatggacctaacagatattttcagaatagttcatccagcagcagcagaatatacaatcatctcatcaacacatggaatattctccaggatagaccatatgttaggacacagaacaaggctcaataaaattttaaaaattaaaatcatatcaagtatcttctcagaccacaaaggaataaaacttgaaatcaataagaagaagaaatttggaaactgtacaaatatatggacattaaacatgctattgaataatcattgggtcaatgaagaaattaagatggacatcaaaaaaattttttaaacagaaaatggaaacacatcatgcaaaacctatgggatacagcaaaagcagtactaggaggaaagtttatagcaataaatgcctacactaaaaaagtagaaagatttcaaataaacaacctaatgatgcacctcaaggaactcaaaaagcaagaacaaatcaaacacacaattagtagaaagaaaaaatataaataacatagcagaaccaaatgcaacagagacaaaaaaaaatgcaaagaatcaacaagataaaagttggttttttgaaaagttaaacaaaattgataaaccactagtgaggctaaccaaaaaaaaaaaaaagagaccaaaataaatacaatcagaaatgaaaaaggagacattacaagtgttaccaaagaaataaaaaggataattagaggctattatgaacaatcatatgctaacaaattggaaaacctagaggaaagggataaattcccagacatacacagcctaccaaggttgaactaggaagaaacagaaaacgtgaactgacccaaaatgaatagcaggtttgaatcagtaacaaaatgtctcccaaaggagaaaagccctagactaggcttttatgctgatttctacccaatttataaagaaaaacaaacaccaattcttctcaaactattcccaaaaattgaagaggaaggaattcttcctaactcattgtataaggccagcattaccctgatatccaatcaagacaaggacacaacaaaaggagaaaactacaggccaatattcctaatgaacacagatggtaaaattctcagcataatactaccaagccaaatctaatgatgaatgaaaaagataatataccatgatcaagtgggatttatcccaggaatgcaaaggtggctcaacatacacaaatcaatacatgtgatacatcacattgacaagatgaaaggcaaaaactatctgatcatctcagcagatgcagaaaaatcactcagtaaaacttaccattccttcatgatgaaaactctcaacaaattaagcatagaaggaacacttcaacctaagaaaaggcatatatgacaaatctacagctaacatcctactcactgggaaaaattgaaaagcctttcctctaagaactggaacaagagaaggatgcccactttcaccactcttattcaacacagtatgggacatccaagccagagtgatcagacaagataaagaaaaaaaaggcatccaaatggacaaaaggaagtccaattgtctcactttgcaaatgacataatcgtatacctgtaaacagaaaaacctaaagactctaccaaaaaactcttaaaataaatta

SEQ ID NO: 4559 - DNA, 1023 bp, Homo sapiens
  source 1..1023: mol_type = other DNA
gtagggaaaagaaagagagatcagactgttactgtgtctacatagaaagggaagacataagagactccattttgaaaaagacctgtactttaaacaattgctttgctgagatgttgttaatctgtagctttgccccagccactttgccccaaccactttgacccaatctggagctcataaaaacatgtgttgtatgaaatcaaggtttaaggcatgtagggctgtgcaggacgtgccttgttaaccaaatgtttgcaagcagtatacttggtaaaagtcatcaccattctctcatctcaataaaccaggggcacaatgcactgtggaaagccgcagggacctctgcccttgaaagctgggtattgtccaaagttcctccccatgtgatagtctgaaatatggcctcgtgggatgagaaagacctgacggtcccccagcgcgacacccataaaagatctgtgctgaggtggattagtcaaagaggaaagacttgcagttgagatagaggaaggccactgtctcctgactgcccctgggaactgaatgtctcggtataaaacacgattgtacatttgttcagttctgagatgggagaaaaaccgccctatggtgggaggcgagacatgtttacagcaatgctgccttgttatcctttactccactgagatgtctgggtggagagaaacataaatctggcttacatgcacgtccagtcatagtaccttcccttgaacttcattatgacatggattctattgctcacgtttgttgctgaccttctccttattatcaccctgccctcctactacattcctttttgctgaaataatgaagataataatcaataaaaactgagggaattcagagacctgtgccagtgcaggtccttagcatgctaagcgccggtcccctgggcccgctgttgtttctctatactttgtctctgtgtctgatttcttttctgtctctcatcccacccgacaagaaatacccacaggtgtggaggggcaggccaccccttca

SEQ ID NO: 4560 - DNA, 1282 bp, Homo sapiens
  source 1..1282: mol_type = other DNA
cttctgatcaagattaaataacaggtaccacattgaacttccctcctaaaataacagagaaaaaaaaagaaaacaaaatctgtgaaacaaccacggcactcaaggcattgacatcaggcatggaaaggcaatgatccttgaagacaggaaacaaaggaaatgggtcccatgcttgttccagcttactattgagagagttttcaggccatagtacagggaaggggaacctaggcagatccttgtgatctccctgaatggaggaaatataactaagagtccagggaagccaagatagctagactagagtagagagatgcacaaagagagaaatctggagatgtgaggaggtctcctgaatactgatgagcacatgcatgtgaagaaactacccaaggccagggaaagagctatctaatggattagagagaacagtgcctggaactcacacagggatgagaatagtacctgttctcaacaaccagaaaggaaagaaatccataattcagagacattggttacttttgcttcagtagtagaaaaaaattaaccatagattaaacaccactctggtcatcctgagcacaactttaaaataagacccaaaagcatcaaactgtttccaaataaataactgcatccaagaacaaaactcaagaatgtttataaagaaaacaaaaataaacagcacccacaatgtctagattccaggtaaaattaccaggcaaacaggtagcaggaaaatacaacccctaataagggagggaaaatcaacccatcaaaactgacctagaaatgacacagatataaaaattaataggaaaggcattaaaacaattattgtgattgcattccatatgttcagaaaactataagaaagattgcccatgttaattagatacatggaaggtaggtgtgtgtgtgtgggcagtgggggtgtatgtctttacatatgtaaagacccaataagatgaaacctacaatggctgaaatttttgaaaagataaaacacacaaactggatgggattaatggcagcttagacactgcagaagagaagactagtgaactggacaacacagcagtgaaaactacccaaaatgaaataaaaaaaagaatcttaaaaaaatgaacagggcaccagtgaattgtgggacagtctcagggagtcaaatatatgttttagtgaagtctggacagtctcaaggagtcacatatatgttttagtgaagtctccaaaagaagaaagctatgaggagacaaaaagatttaagaaaattgtggct

SEQ ID NO: 4561 - DNA, 919 bp, Homo sapiens
  source 1..919: mol_type = other DNA
aaaggaagaaagaaagacccataataagaaagtatgtcaaatgggcacaggaagtaactgaagagttcccaatagccaaggaagaaaaaccatgagcaacaaaataaaaccatattattggattataactcaaataaattaaaaattatcaaataaatacctgcaagtccatgctgatatataaataaataaataggagagaggagttaaatctcccaggtagaaaaaatctaaatagttcatgtagatcctctagccatggagaaggaagagcaggaatgccctcttcttaggggatggctatgcacagtgacttccttctgaagagtttaatataaaaagggagttaagaaagaacaaaaacacaaaagtatctttaaagtggacaaacctgacaaccactacagcagccaggtaatcaaagtcaacatcagtgataggtcatgctgatggtgcctacccttgatttcataaaagcggaactttacctctgtggccttcctccataatcccaatctaataagaagaagaatcagacaaccctcacagaggtacgttctatgaaatacctgaccagtcaaaactggtcatcaaaactcaagactgtcaatgtcatcacaaaccaggagagtctgagaaagcggcacagcccagggcaatctaagaagacatgatcactaaatgtgatgtgggatcccagatgggatcctggaccaggtaaaaactaaagtaatgtttcaacttcagtaaataataatgtatcaatattggtccattaattgtggcaaatgtgccacactaatgcaaagcgttagtaacagggaaaactgggagcagggtatatgagaactttttgaactgttttcacaattctcctgtaaatctaaaactcttctgaaaatagagtttattctttaaa

SEQ ID NO: 4562 - DNA, 120 bp, Homo sapiens
  source 1..120: mol_type = other DNA
ttatttgtgtgactaattgcctagattgtaagctctttgagggcagggcttgtctcttacacatctttataatcccctgcagcggctttcagtattttgtacttgtaggcacctaataaa

SEQ ID NO: 4563 - DNA, 220 bp, Homo sapiens
  source 1..220: mol_type = other DNA
agagcgagcattagatttagagagcaaaatatttgggttctaatatgcaaagccacttaccagctgtgagggcttcggcaaagaactgaatctgagctcagctccctcaactgtaaaactaggttattcggacctatgtggcctaccacacaggcttattgcaaggttcaaatgcagaaacatatgaaagtgctatgaatacaacttagagcaatacaaa

SEQ ID NO: 4564 - DNA, 2841 bp, Homo sapiens
  source 1..2841: mol_type = other DNA
tctgggacacagctaaagcagtgtttagagggaaatttatagcactaaatgtccataagagaaagcaggaaagatctaaaatcgacaccctagcatgacaattaaaagaactagagaaggaagagcaaacacattcaaatgctagcagaagacaagaaataactaagattagagcagaactgaaggagatagagatacaaaaaaactttcaaaaatcaatgaatccaggagctggttttttgaaaagattaacaaaatagaccgctagccagacgaataaagaagaaaagagagaagaatcaaagagacacaataaaaaatgataaaggggatatcaccactgatcccacagaaatacaaactaccattagaaaatactagaaacacctctatgcaaataaactagaaaatctagaagaaatggatacattcctggacacatacaccctcccaagactaaatcaggaagaagtcaaatccctgaatggaccaataacaagttctgaaattgaggcagtaattaatagcctaccaaccaaaaaaaagcccaggaccagacagattcacagctgaattctaccagaggtacaaagaagagctggtacaattccttttgaaactattccaagcaatagaaaaagagggactcttccctaactcattttatgaggtcagcatcatcttgataccaaaatttggcagacacacaagaaaaaaagaaaatttcaggccgatatgcctgatgaacatcgatgcgaaaatcctcaataaaatgctggcaaacccaatccagcagcacatgaaaaagcatatccaccactatcaagtcggcttcatccctcggatgcaaggcttgttcaacaaacgcaaatcaataaacataatccatcacataaacagaaccaatgacaaaaaccatgattatcaatagatgcagaaaaggccttcaataaaattcaacaccccttcatgttaaaaactctcaataaagtacgtattgatggaacgtatctcaaaataataagagctatttatgacaaacccacagctaataccatactgaatgggcaaaagctggatgcattccctttgaaaactggcacaagacaaggatgccgtctctcaccactcctattcaacatagtattggaagttctggccagggcagtcaggctagagaaagaaagaaagaaaggatattcaaataggaagagaggaagtcaaaattgtctctgtttgtggatgacatgattgtatatttagaaaaccccatcatcttagcccaaaatctccttaagctgataagcaacttcagcaaaatctcagggttcaaaatcaatgtgcaaaaattacaagcattcctatacaccaataatagagagccaaatcatgagtgaactcccattcacaattgctataaagagaataaaatacctaggaatacatcttacaagggatgtgaaggacctcttcaaggagaactacaaaccactgctcatggaaataagagaggacacaaacaaatggaaaaacattccatgctcatgggtaggaagaatcaatattgtgaaaatggccatactgcccaaagtaatttatagattcgatgctgtccccatgaagctcccattgactttcttcacagaattagaaaaaactactttaaatttcatacggaaccaaaaaagagcccgcatagccaactcaatcctaagcaaaaagaacaaagctagaggcatcatgctacctgacttcaacctatcctacaaggctacagtatcccaaacagcatggcagtggtaccaaaacagatattatggtactggtaccaaaacagatagaccagtggaacagaacagaggcctcagaaataacgccatacatctacaaccatctgatctttgacaaacctgacaaaaacaagcaatgggggaaaggattccctatttaataaatggtgctgggaaaactggctagccatatgtagaaaactgaaactggaccccttccttacaccttatacaaaaattaactcaagatggattaaagacttaaacgtaagacctaaaaccataaaaaccctggaagaaaacctaggcaataccattcaggacataggcatgggcaaagacttcatgactaaaacaacagaagcaatggcaacaaaagccaaattgacaaatggcatctaattaaactaaagagcttctgcatggcaaaaaaaaaaaaaaaaaaaaaaaaaaaaaaaaaaacaactctcatcagagtgaacaggcaacctacagaatgggagaaaatttttgtaatctgtctatctgactaagggctaatatccagaatcttcaaagaacttaaatttacaagaaaaaaacaaccccaccaaaaagtgggcgaaggatatgaacagacacttctcaagaagacatttatgtggccaataaacatatgaaaaaaagctcatcatcactggtcattagagacatgcaaagcaaaaccacagtgaaataccatctcacaccagttagaatggcaatcattaaaaattcaggaaacaacagaagctggagaggatgtggagaaataggaacgcttttacactgttggtgggagtgtaaattagttcaaccattgtggaagacagtgtggcaattcctcaaggatctagaaccagaaataccatttgacccagcaatcccattattgggtatatacccaaaggattataaatcattctataaagacacatgcacatgtatgtttattgcaacactgttcacagtagcaaagacttggaaccaacccagatgtccatcagtgatagactggataaagaaaatatgg

SEQ ID NO: 4565 - DNA, 98 bp, Homo sapiens
  source 1..98: mol_type = other DNA
gagggcatcagctggagcctcaggctgggaccagccccaactttgccttggtgactctgggccattccaggcctcagtttccccagctgtaaggtgag

SEQ ID NO: 4566 - DNA, 106 bp, Homo sapiens
  source 1..106: mol_type = other DNA
ttcccaaggacaggtccaggcctgtgtcagtcactgcttcatcccagcacctagcacagggcctgactcatggtgagctgtggacaaacgcacatgcaattaacga

SEQ ID NO: 4567 - DNA, 227 bp, Homo sapiens
  source 1..227: mol_type = other DNA
ctgcggctggcccggtctccgcaaacctttttctgcttggccagctggtgccatgctaggctttcccactaggggcgccagagaaagcgcgcgaggctgcggaggagagaggggcacactctttccggtttgcttccggttttttcctcaggcttccggtctgtttggtgccctggtcgcgtgtcttccgaactctgctgcttcgccccggcaagagcacttccttc

SEQ ID NO: 4568 - DNA, 563 bp, Homo sapiens
  source 1..563: mol_type = other DNA
gtggtcagcagaatgccacccttccccaacaaaagaggttcattccttaatccctggaaccagtgaatgttagtttacatggcaaaatgtgtcctgcagatgtgtttaatattaaaaaccttgaggagggagattatcatgtattatctggctgggcccaacctaatctcatgagtccttagggacaacctttcctgtctgcagggaaccagagaaatggttcgtgacacagactgaacctgctagctctgaagatggaggagggggccaagagccaaggaatgtaggcagcctctacaagctggaagtggccttagtttacagtcagcaagaaagtggggaccttggccctgccaccgaaaggatgtggattctgccagcagcctgaaggagcaggagacagagtctcccctagaacctccaggaaggaaggcagcctgccagccttgattctagtccagtgagacccatagtcagacttccagcctacagaattgcaataaatttgtgttaagtcactaagtttgtggtaaattttacagcggcagtataaaactaataca

SEQ ID NO: 4569 - DNA, 406 bp, Homo sapiens
  source 1..406: mol_type = other DNA
tctggagttgaggctgttgtcagcaaagcccctggtcccacacagctctgccctagagccacctctttgaccctttacccaccctgagaccagaacttgcagcccctctgcagatctcctctggccactgcagcccctccaatgggctttttctctcatgcattccctggcctggaggcgtcagggaccccacatcctccctgctcctcagactcacagcccctccatgttacctcccgcacctcctccctggggcagctgctccctgggcctctgaggatgtcagctcctggctccctgcctctctcccactccactcctggctcagtcttagagatttctatgccctcatggattctacccctgccttcctggcctcttgattcttggcttgcctctcctccaa

SEQ ID NO: 4570 - DNA, 268 bp, Homo sapiens
  source 1..268: mol_type = other DNA
ggggcggtgagtgggggcggagggcgcgcggtcagtcctcttggcccgggcagggcacggagcccaaagttaggcccctccgcttgccacctgggtgcccttaagcagttatgtttctttgcttctgttttctcgtccgtgaaatgggggtgacgctcggacctactgggacctacctggacctactttacagggctattgtgaggatttgatgataggcgtacagggcttaggaccgtgtaaatggtctataaatgttaccttgtat

SEQ ID NO: 4571 - DNA, 221 bp, Homo sapiens
  source 1..221: mol_type = other DNA
gctgggcatgggtggagaaggagaaggtgacagggttgggtggctctccctacatggtcacatcctgtgaagacactgaggacaccaggaattctaaatttgaacctgatgccccagagctttaagaaaatgtttttgtcaaaggagaaaaccagaacgttttattagtttcttgaacctatttatagcgtcaaaagttagacgcaggtgcaggcctccat

SEQ ID NO: 4572 - DNA, 834 bp, Homo sapiens
  source 1..834: mol_type = other DNA
ctctggagagataaacaggcagatacaaagaatcacaaccacatcttgtgagcaataatctcccagggaaccggtggccagatgggtaagcctaaaatgtaactggcaaattgctagaggctcagtgtggacaactctgaaaaaaaactccagggggacccggtcatgggaggaccccatacttttgtgagctttacctccaggagctctattaggtactgacagtgaatatcagagaaaaatctccttgtgcttctggcaggaggaagtgaaaagggaccactttggaatataccattctgttcttaacaagacctgccctcaggagaaacaattttaccagggcctaacctgctggtgtttttatcagaacttaaccttcctgggggaagggaaatacctaacactagctacttctggatattctgtcccacctaatggcaggtgggggaagctgaaaagcacttgggaagttcatagtccagggacacaagctcagcaagactgagccctgctcatagtatcatagaacactttcccaccccaacacctgaaaacaggatgaaagccctgtttactgcaattccttttacccagtgtatcatgtctacctatcaacagaaaattacaaagcatacttaaaaggcagaaaatgcagtttgaagagactgaacaagcattagaaccagagtcagtcgtggcaggagtgttggagtaatcagaccaggtatttttttaaaactatgattaacgtgctgagggctttaagggaaaaagtagacagtatgcaaaaacagattgataatgtaagcaaaagagattaaaattttaaga

SEQ ID NO: 4573 - DNA, 529 bp, Homo sapiens
  source 1..529: mol_type = other DNA
gtccctgccaccaactccaccctggtgacagcctctctgctgggctctagcctcctcccttgcacccctccacacagcagccaatcaccagatcacgtctctcctctgctgaaaaccctcagaagggctcctctgtcactcagaattgagccaaagtccttaaaaggctctcaggccttgacctctgtaccctccccaacgtcgcctccccacaatgatctccacctgcttggctgcagccaggcgggccttaagcacgtcaggcctccccacactggccgcctgagccccgtcctccccaccttgtgctgctcccctcagagcgctgtgcccccggctccttcaagtcctcgctcagatgtcacaccctcaaggaaggtcgccccatcagcacgcagaccccaccctacttgctgcatcacacgccatcctctgatgagctattccagttaatttttatgatttattttacaatgtttcccctcccctcagccgcactagaatgtcagctccatggggtcagggattt

SEQ ID NO: 4574 - DNA, 115 bp, Homo sapiens
  source 1..115: mol_type = other DNA
gctggtatcttccaaactcagttcccagactagattgatacctggagcccagctgcctactcagcatttccacttgggtgcttcataggcatttcaaacctgatgtgtttaaaac

SEQ ID NO: 4575 - DNA, 992 bp, Homo sapiens
  source 1..992: mol_type = other DNA
gtgggtggcaagccacccaggtgccgaggaaagagactgagggcacgagctgttccagtataataaaatatataaaataagaagagttatactagatctagatcatagacatgattatatgtgagtatcattaatcattagtttatagcaattactctttattccaatattataataatcctcactctacaatcataacctaggaaaaaccaggccatacagagataggagccgaggggacatagtgcgaagtggccagaagacaagagtgtgagccttctcttatgcccggacagggccaccagagggcttggtctagcagtaacaccagtgtctgggaagatgcctgttgcaaagtggaccatggtctagcagtagcatcagtgtcaaggaaaaacacccactacttagcagactgggaaaaggagcctccctttccccgggggagtttagagaagactactcctccacctcttgtggagggcctgacatcagtcaggcccgcccgcagttatccagaggcctgtctccctgtgatgctgtgcttcagtggtcacgctcctagtccgctttcatgttccatcctgtatacctggctctgccttttagatagcaggagcaaattagtgaaagtactaaatgtctgatatgcagaaataatggcataagctgtctctctctcttctctctctctctgcctctgctgccaggcagggaagggccccctgtccagtggacacatgacccatgtgaccttacctattattggagatggttcacattccttaccctgcccctttgtcttatatccaataaatatcagtgcagcctggcatttggggccactactggtctccgcgtcttggtggtagtggtcccccaggcccaggtgtcttttcttttatctctttgtcttgtgtctttatttctacaatctctcatctctgcacatggggagaaaacccactgaccctgtggggctggaccctaca

SEQ ID NO: 4576 - DNA, 165 bp, Homo sapiens
  source 1..165: mol_type = other DNA
taggaggagcaccaatgggagtcagaaaagaactctggagttctcccactagtaatgtgtttaatcatggaagttattagcctgttttctcacctgagaaataatatggttggacctacatgacttctcaggtagtttatgttttaaaattgttggttctatgat

SEQ ID NO: 4577 - DNA, 48 bp, Homo sapiens
  source 1..48: mol_type = other DNA
ggaactcagaaaacgttgccagcaggtcctccgtcttgagcgctggtt

SEQ ID NO: 4578 - DNA, 170 bp, Homo sapiens
  source 1..170: mol_type = other DNA
tagatttgtgcatactgtaagcaaattgcttagcttctctagacatcagtttccacatctgaaaaataagaagatgagagtacacggttgttatgaacaaatgacttaatgctttttaagcacgttgcatgacatctggaacacagaaagccctcaatacattgaagctc

SEQ ID NO: 4579 - DNA, 282 bp, Homo sapiens
  source 1..282: mol_type = other DNA
caggcatggtggctcacacctgtaatcccagcactttgggaggccgaggtgagtggatcacttgaggtcaggagttcgagaccagcctggccaacatggtgaaaccccatttctactaaaaatacaaaaattagctgggcgtggtggtgggtgcctgtaatcccagctactcgggaggctgaggcacgaaatcgcttgaacctgggaggcggaggttgcagtgagctgagattgcaccactgcactccagcctgggtgatagagcaagactcagtctcaaaa

SEQ ID NO: 4580 - DNA, 234 bp, Homo sapiens
  source 1..234: mol_type = other DNA
aaagtcatcgtgatggtagaggatggactagtgtgagtcagaaagttctgggcttctgtctaggctccatcacttcttggcattttggtgttgaggagaccacttaactcatctgagcttcggtctttctctttataaagagcaaaattataccacaacagggtggctgtatacattcaatgagatatacatgaaacactttgcacacagtaggccctcaataaatgtgagttc

SEQ ID NO: 4581 - DNA, 168 bp, Homo sapiens
  source 1..168: mol_type = other DNA
agttagccttttacctgtctagatcagctcctcatctagactggaacctctctgagggcagggcccattttgtaggtttataactgctcaactgcaggttatagctgtagtcttgtaactccttgtacagtgtctcacaaagccaggcactcagagagaatttgctga

SEQ ID NO: 4582 - DNA, 316 bp, Homo sapiens
  source 1..316: mol_type = other DNA
gccaggcatggcggttcatgcctgtaatcccagcactttgggaggccgagttgggcacatcatttgagcctaggggttccagaccagcctgagcaacacagcaaaaccctgtctctaccaaaaatacaaaagaatagctaggcatggtggtgcgtgcctgtagtcccaggtacttgggaggctaaggtgtgaggatcacctgagcctgagcctgggaagtcaaggctgcagtgagccgagatttttgtgccactgcactctagcctgggtgatgagagtgagacccaagaaataaagaagaaagagaaaaagaaaa

SEQ ID NO: 4583 - DNA, 1115 bp, Homo sapiens
  source 1..1115: mol_type = other DNA
ttagaagctcatccaggatattttcaatattaagtcagtgcatagctgcaccactaacaaattggtgcctgtagagtcagagtgggtcaattcttaggacaatggcgctggcactgttagaggactggtgcaggataatgagtgtggatgagcagaagtcactgatggttacggggataccggcggactttgaggaggctgagattcaggaggtccttcaggagactttaaagtctctgggcaggtatagactgcttggcaagatattccggaagcaggagaatgccaatgctgtcttactagagcttctggaagatactgatgtctcggccattcccagtgaggtccagggaaaggggggtgtctggaaggtgatctttaagacccctaatcaggacactgagtttcttgaaagattgaacctgtttctagaaaaagaggggcagacggtctcgggtatgtttcgagccctggggcaggagggcgtgtctccagccacagtgccctgcatctcaccagaattactggcccatttgttgggacaggcaatggcacatgcgcctcagcccctgctacccatgagataccggaaactgcgagtattctcagggagtgctgtcccagccccagaggaagagtcctttgaggtctggttggaacaggccacggagatagtcaaagagtggccagtaacagaggcagaaaagaaaaggtggctggcggaaagcctgcggggccctgccctggacctcatgcacatagtgcaggcagacaacccgtccatcagtgtagaagagtgtttggaggcctttaagcaagtgtttgggagcctagagagccgcaggacagcccaggtgaggtatctgaagacctatcaggaggaaggagagaaggtctcagcctatgtgttacggctagaaaccctgctccggagagcggtggagaaacgcgccatccctcggcgtattgcggaccaggtccgcctggagcaggtcatggctggggccactcttaaccagatgctgtggtgccggcttagggagctgaaggatcagggcccgccccccagcttccttgagctaatgaaggtaatacgggaagaagaggaggaagag

SEQ ID NO: 4584 - DNA, 88 bp, Homo sapiens
  source 1..88: mol_type = other DNA
aaagatacttaaccaggaagcagcaggccctcgggtcagactcctattagcttagcacttctgaactggtgactttggttggttcact

SEQ ID NO: 4585 - DNA, 114 bp, Homo sapiens
  source 1..114: mol_type = other DNA
aaaatgaattccctggtcagtttggaaaactctgggtttcatggagttacacaggtttctttacggcagaacttctcagagcctttgaaatgcttttaacatgcacgatggatc

SEQ ID NO: 4586 - DNA, 124 bp, Homo sapiens
  source 1..124: mol_type = other DNA
ccctattagataagcttcctgaaggttggacgccacgcctgtctgggcccctgccgccaccccatccagagcctgcttggaactagcatgtgatcagggcttagaaacatctattgaaatgaat

SEQ ID NO: 4587 - DNA, 191 bp, Homo sapiens
  source 1..191: mol_type = other DNA
taggaatttaaaggaaagtacagatactatataaaaaaagatgcccatgaaaatgttaagttataataatagtggagcattgggcacaactgaaatggccaatcttgtgagaatggtaaaataaacttaggtccgtgagtaagtggagtattacatagccataaaagtatgcccttaaagaatatttgaag

SEQ ID NO: 4588 - DNA, 148 bp, Homo sapiens
  source 1..148: mol_type = other DNA
aggaaggagctcggtgcaggccagctctgtcacctgctagcctgggtctcccgcaacgcggcaggtctccaggtctcagtttccccatctttgcgaaaggatgatcattatatctgttctatttacccccccaccacagaattgtggt

SEQ ID NO: 4589 - DNA, 145 bp, Homo sapiens
  source 1..145: mol_type = other DNA
aatcggatatgatatgaagccagccataaagcccaggatgaccaagaatataatttgaaaatgaatttgtttactatccttaatggtaagcatcaccttaagcacatattatgccttgagacactagccaattgtggtacatgaa

SEQ ID NO: 4590 - DNA, 392 bp, Homo sapiens
  source 1..392: mol_type = other DNA
gaccagaaagtaacaggacagatttctcccagcaaatcagtctccacaaccaaatgaatattgttctccaaggagtcaagctatagactcacaatgacaacgtggccatggctcaaaacactctctgaaattacaaaattgctttctgagccaatttaaaagtcacatgattgaatccaagctattttactttaaatggtccttttgctttgcacctgagacctcgcttggccacagacgtcattcgctggactccctgggcactaaatgagtgtctagcatccttaaggctgctcaacacacagccccagactctgaatatgattccaagaaatattctgaaaaaagtcacatcgctggaataaacagtttcccaagataactgctttgaa

SEQ ID NO: 4591 - DNA, 307 bp, Homo sapiens
  source 1..307: mol_type = other DNA
gctgggcacagtggctcatgcctgtaatcccagcactttgggaggccaaggtgggcggatcacttgaggccaggagtttgagaccagcctggtcaacatggtaaaatcccgtctctactaaaaatacaaaaattagctgggggtggtggtgcacgctgtaatcccagctacgagggagactgagacatgagaatcgctttaacccgggaggcgaaggttgcagtgagccaagattgcaccactgtactccagcctgggtgacagagcgagactgtctcaaaaaaaaaaaaaaaaaaaaaaaaaaaaa

SEQ ID NO: 4592 - DNA, 274 bp, Homo sapiens
  source 1..274: mol_type = other DNA
ccagcactttgggaggccgagaggccgaggcaggaggatcgcttgaggccaggagtgccagactgcgagactagcctgggtaacatagtgagaccctctcttcaaaaaaaaaaaaaaaaaaaaaaaaaaaaagcctgtcacggtggcctgcgcctgtaccccagctactcgagaggatcgcctgagcccagtgaagctgcagcgagctgtgaggatgccaccgcactccggcctgggctaaaaagctagatcgtgtctctgataaaagaataaa

SEQ ID NO: 4593 - DNA, 201 bp, Homo sapiens
  source 1..201: mol_type = other DNA
aaattgctcattgccatccaatatctcttctcctctttttccttgtaatagaaccctgatctcattagcggctgcaatgcaaccagctaagactacaactcccaaactcccttgcagcttgatgtgtccatgagattgtcttagccatgagacacacagaggagggtcgtgtggaactttcaggaaggctgtttaaaggga

SEQ ID NO: 4594 - DNA, 81 bp, Homo sapiens
  source 1..81: mol_type = other DNA
ctatcttgttttttgttttttcttctggggagggtctagaacagtgcctggcacatagtaggcactcaataaatacttgtt

SEQ ID NO: 4595 - DNA, 434 bp, Homo sapiens
  source 1..434: mol_type = other DNA
cccgccagtcattctcccatcttctctggcctgctgtcttcccagaaaataggacttctacataggactacatcacccaaattcccttgcgagccagcttcagttaggggccagccaatgggaggaagtgtcagggaaccagtaggcgggagaagaaagggtagggaacttccttcctgccccctccgagttttgcctctctcactggcagcaacccagcgcttccattgctgacctctaccgacctctacctgtggtccttcctctactgcagcagagacactgttttcttcctttgttcttccaaccccatgtaagttaatgccttgcctctcttgctggtacctgggtgcttcaacatgccattttttggttccttaatgctgcccaaatctctgtaagtaggcccttcactaaagactattaacttacat

SEQ ID NO: 4596 - DNA, 136 bp, Homo sapiens
  source 1..136: mol_type = other DNA
gtataggattaagaacacagatcctggaatcagacagcctggcttccacactctagctgggtgaccatgaccatgaagaagttcctgaatgttccagtgtcagtttattcacctacaaaatgaaaataatatgagt

SEQ ID NO: 4597 - DNA, 134 bp, Homo sapiens
  source 1..134: mol_type = other DNA
aagctccagaaatggacaatgctagtgactgcacaatattgtgactgtacttaatgccactgaactgtacactttaaaatggaaaatttatatgtatttttaccacaataaacaaaaaaccctaaaaaaacttt

SEQ ID NO: 4598 - DNA, 257 bp, Homo sapiens
  source 1..257: mol_type = other DNA
gccaggcatggtgactcatgcctgtaatcccagcaatttgggagacagaggcggaaggatcacctgagcctaggagttcaagaccagcctcagcaacagcaggagccccaccccccgtctctacaaaaaaatttaaaaattaactgggcatggtggctgaggtggaagaatggaagaatcacttgagcccaggagtttgaggctgcagtgagctatgattgcaccactgtactcctgccttaaaaaaaaaaaaaaaa

SEQ ID NO: 4599 - DNA, 598 bp, Homo sapiens
  source 1..598: mol_type = other DNA
agaactgacaactcttccttacagaagaattccaataataaatgtagaaggattgagagaaatagaaaatcaccattagaacaccacagtagtaactgccacaagcaagatctgccaatggatagtaaaatgagcaaaagtttaagcagaaacgggacatttgcatagtctccgggtatctccagcaaatattcaataattacaaggaaaacacagtaagtttacagtagcgaatcctagcagacaccaccttagcatagtgatcaaggttaacaacaccagaaatacattacaacatcaggtatcccctgttatgatacactgtcacagactggaagacaggacgtaggcatgatagctaaatgcaaggctgggtcttggaacagtaaaaggacattagtgaaaagactaaaatctctactttttaaactttctactttagttagtattatatcaaggttaatttcttaattttgacaaatgttctattgttacgtaagatgttaacataagggcaaggtgggtgcagagtatacaagaactctactacttttacaactcttctgtaagtctaaaattatctcaaaagcttaaaaaa

SEQ ID NO: 4600 - DNA, 294 bp, Homo sapiens
  source 1..294: mol_type = other DNA
ggccaggcacagtggctcacgcctgtcatcccagcactttgggaggctgaggtgggaggatcgcttgaagccaggagtttgagaccagcctgggcaacatagcaagaccccatctctacaaattaaataaattagccaagtatggtggcgtgtgcctgtagtcccagctagtctgaaggctgaggcaggaggattgcctgagcttaggtcgaggctgcagtgagctatgtttatgccactgcaccccagcctgggttgacagaatggtaccccatctcttaaaaaagagagaga

SEQ ID NO: 4601 - DNA, 1874 bp, Homo sapiens
  source 1..1874: mol_type = other DNA
ttccaagatggctgaataggaacagctctggtctgcagctcctagcaagatcaacacaaaagagcagtgatttctgcatttccaactgaggtacctggttcatctcactgggactggatcaacagtgggtacagcccacggagggaaagctgaaccaggacagggtgttgtctcacccgggaagctcaaggggtcaggggatttacctttcctagccaagggaagctgtgacagactgtacctggagaaacagtacactcctgaccaaatactgcacttttcccacagtcttagcaatcagcagaccaggagataccctcctgtgtctgcctcagcaggtcccatgcccatggagcctttctcactgctagtgcagcagtctgagattgccctgcaacactgcagcttaattgggggaagggtcatctgccattactgaggcttgaatagcctacagtgtaaacaaagtggccaggaagcacgaactgggcagaccccaccacagctcagcgaggcctactacctttatagattccacctctgggggcagggcatagtagaacaaaaggcaccagacagcttctgcagacttaaacatccagtctgacagctctgaagagagcagcagttctctcagcacagcatttgagctccaagaatagacagactgcctcctcaagtgggtccctgacccccatgtagcctgactgggaaacacctcccagtaggggtcgacagacacctcaaacaagcaggtgcccctctgggatgaagtttccagaggaaggatcaggcatcaatattggctgttctgcagcctccactggtgatacccaggcaaacagggtctagagtggacctacagcaaactccaacagacctgcagctgaggggtctgactattaaaaggaactaacaaacagaaaggaatagcatcaacataaacaaaaaggacatccacaccaaaaccccatctgtgggtcaccaacatcaaagactaaaggtaggtaaaaccacaaagatggggagaaaccagagcagaaaagctgaaaattccaaaaaaacagagtgcctcttctcctccaaagaataacagctcctcgccagccagggaacaaaattggacggagaatgagtttgacgagttgacagaagtaggcttcagaaggtcggtaataacaaatttctccaagctaaaggagcatgttgtaacccatcacaaggaagccaaaaaccttgaaaaaaggttagacaaatggctaactagaataaacagtgtagagaagaacttaaatgacctgatggagctgaaaaccatggcacgagagcttcatgatgcatgcacaagcttcaatagccgattcgatcaagtggaagaaacaatatcagtgattaaagatcaaattaatgaaataaagtgagaagacaagattagagaaaaaaagagtgaaaagaaactaacaaagcctccaagaaatatagggactatgtgaaaataccaaatatatgtttgattggtgtaccggaaagtgacagggagaatggaaccaagatagaatacactcttcaggatattatccaggagaacttccctaacctagcaaggcaggccaacattcaaattcagaaaatacaaagaacaccacaaagatattcctcgggaagagcaaccccaagacacataattgtcagattcaccaaggttggaatgaaggaaaaaatgttaagggcagccagagagaaaggttggcttaccaacaaagggaagaccatcagactaacagcagatctctcggcagaaaccctacaagccagaagagagtgggggccaatattcaacattcgtaaagaaaagaattttcaacccagaatct

SEQ ID NO: 4602 - DNA, 304 bp, Homo sapiens
  source 1..304: mol_type = other DNA
ggccaggcgcaatggctcacgcctgtaatcccagcactttgggaggctgaggcgggcggatcacaaggtcaggagatcgagaccatccttgctaacacggtgaaaccccatctctactaaaaatacaaaaaattagccgggcgtggtggcaggcgcgggtaatcccagctactcgggaggctgaggcaggagaatggtgtgaacccgggaggcggagcttgcagtgagccgagatcgcgccaccgcgctccagcctgggcgacagagcaagactccgtcaaaaaaaaaaaaaaaagagagagaa

SEQ ID NO: 4603 - DNA, 716 bp, Homo sapiens
  source 1..716: mol_type = other DNA
agcaggcccttcaataatattccattcagtgtcatttcattataactttgatgaggaaaacaaaaatcaattcctgtctggggacactgtctgcctgggttttgtccaggtaccccggtttccttccacatcccaaagcttgcacattaagccaactgaggatgtatctacgtgggcccagtctgagtgagtgtgggtgttagtggctctgcaataggatggtggcgtctgtccagggctggtcccgcctggcgccctgagctgccaggtggctctggccacccccacccaagaccctgaaccggaataagcacgttggaaaatgaatgaatacaaagtgttataaagtaaaaatctgtctagtctgtgctaaatacacgaatgcatgataaactgtgaggtgtggaggcagtcagggagcctgccctatttgtgattgtttttgaacttcatggtagtaagaggtgttccttaccatttttgctttgcaaacatttattccctgaattaacccaccactattatggccgccatcattcacttattctccaaaaattgggtaaataaataccatgtttgtttttattaacctttcttaaatgttgtatagctcacatttatttcaatattgaatgttagaagtgttttgggtctttatttagaagtttgctgatgtttttatgactagaaatattgccacaagaacttcactcttc

SEQ ID NO: 4604 - DNA, 649 bp, Homo sapiens
  source 1..649: mol_type = other DNA
gtgaaaggaaaataaatctcaggaccccaacgtcatgagccaagggaaatgtcaagccgggaactacgtcaggcaaacctgcctctcatttattcctcaataagatagctgcaaagttttttttttttttttttaattctctacaaggacattccttgcaggcctaaagatctttaccctaaaacagttctgttgactttcaccttggcattgtaaatggatagcttatcttcccaggtgcaggacagaaaatcatccctctgctcatctgagacaaatgcgtatctgattgcttcctctgccctattttttatgtaaaaatgcagatgaactgagccagactcaattgtgtgttcagtgaaaagctgatcaaggactcagaatacagccttttgtctcttatctacctatggcctggaagcccttgcttcgagttatcccaactttcccgaccaaaccgatgtacatctcacacatgttgattgatgtctcatgactccctaaaacgtctaaaggcaagctgtgccctgacaaccttgggcacatgtcctcaggacctcctgaggctgtgtcacgggggtgtccttaaccttggcaaaatcaactttctaaatcgattgagacctgtctcagatactttgggttcaca

SEQ ID NO: 4605 - DNA, 146 bp, Homo sapiens
  source 1..146: mol_type = other DNA
gagcatgggcctggcctcggctgtgactgccctggccgtgctgctggcggctgtgtgaccctgggcaagccacttgctctctcctgggctctgccttttgatctgtataaccaggaccttgggccagtggccgccccccccagccc

SEQ ID NO: 4606 - DNA, 301 bp, Homo sapiens
  source 1..301: mol_type = other DNA
gccgggcgcggtggctcacacctgtaatcccagcactttgggaggccaatgtgggtggatcatgaggtcaggagttcaagaccagcctagccaagatggtgaaaccccgtctctagtaaagataacaaaaaattagctgggcttgatggcatgcgcctgtaatcccagctactcgggaggttgaggcaggagaatcgcttaaacccaggcggcagaggttgcagtgagccaagatcgcgccactgcactccagcctcagcaatagagtgagactgtctcaaaaaaaaaaaaaaaaaaaaaa

SEQ ID NO: 4607 - DNA, 266 bp, Homo sapiens
  source 1..266: mol_type = other DNA
ggctgggtgcagtggctcacacctgtaatctcagcacttccggaagttgaggtgggcagatcgcttgagcctaggcatatcgcttgcagcctgggcaacgtggcgaagccgtctctaccaaaaaatacaaaaagtagccgggcatagtgacatacacctgagcccaggaggttaagcctacattgagccgtgattgtaccagtgtactctagccagggtgacagagtaagaccctatctcaaaaaaagaagtgccataaaaaagaa

SEQ ID NO: 4608 - DNA, 463 bp, Homo sapiens
  source 1..463: mol_type = other DNA
agttgacccttgaacacttgaacaacacaggtttggacatcgagggtccactgataatgtggattttcttccacctctgccacccctgagacagcaagacaaatacctcctcttcctcttcctccttcttcccagcctactcaacatgaagacaatgaagatgaagagctttatgatgatccactccgacttaattaatagtaaatatattttctcttcatgattttcttaatcacattttctctagcttactttattgtaagaatacagtatatattacatataactaataaaatgtgtgtgaatctcctgcttatattttcagttaggcttccagtcgacagtaggctattaatagtaaaatgtgggggagagtcaaaagttatacattaaattttaactgtggtgtggtagtggtaggggatttctgtcccaaactcctgtgttgttgaagggtcaactg

SEQ ID NO: 4609 - DNA, 760 bp, Homo sapiens
  source 1..760: mol_type = other DNA
tgagagacaggactcgctggatttcctaggccgactaggaattcctaagcctagctggggaaggtgaccacacctacccttaaacacgaggcttgtaactcagctcacacccgaccaatcaggtagcaaagagggctcactaaaatacaaactaggctaaaagcaggaagtagagaaatagtcaaatcacatatcgcctgagagtacaggggtagggacaatgattgggatataaacccaggcatttgagcaggaagtgggcaaccccctttgcatcccctcccattgtatgggagctgttttcattctattaaatcttgcaactgcacactcttctggtctgtgtttgttacagctcgagctgagctttcgctcactgtccaccactgctgttcactgctgtcccagacccaccattgacttccacccactggatccagcagggtgtccgctgtgcttctgatccagagaggtgtccattgccgctcccaatcgggctagaggctcaccattgttcctgcatggctaagggcccagggttcatcctaatcgagctgaacactagtcactgggttccacagttctcttccgtgacccatgacttctactagagctataacactgaccacatggcccaaggttccattctttggaatccgtgaggccaagaaccccaggtcagagaacaaaaggcttgctgccatcttgggagtggccaccaccatcttgggagctctaagaacaaaggcctgcctgtaac

SEQ ID NO: 4610 - DNA, 56 bp, Homo sapiens
  source 1..56: mol_type = other DNA
tctgcccctcattcccttcatgaccttgggcaagtcacgtaatgtttttgtgcctc

SEQ ID NO: 4611 - DNA, 921 bp, Homo sapiens
  source 1..921: mol_type = other DNA
gaaggaaggctagaaagaaccctcaggtgttgggccaacattagaagtactgttataaactcatggcatttaagtttatatacacagcagacataaaaatagtttttaaaagtgttacatatgtgtgtatatatacacagacacattcatgtatgcgtgtaaaacacacatatataacactgctcaactctctctactaagagggcacaggagcaataagcacaatgagcagccagcttttggtttctaaatactattttccacgaaaggaaccaagttgcccggagaaatgacaattccaggttggagcatgaactgtaaaagataaacctgggtcatcttatgccagaagattaggaagcactcaacactagaaataccaaaaggacacaggagccacttcaaagagttccccactgggaactctggccaaatcagagacaatatcagcaccaaattaatgttagcaatggaatataacctgttagtaaactaagaatctagattccatgttaacataaatgaataaatacatggggagagaagggaaagcgctccttacagaatactaactaataaatgcagtaggagcgaagaagacaagaactactccttggcatccttcacagaggtagctgattcagggggaagttatcaatgaaggccaaggcttgtgggtttactggaaaacaggatactgatataacactggaatatgcccccacaaaatactgattaatacaaagggaactattgtgactttacagtagaaaacctggcattcagcaacatcacccatgatggtatactgtctacaaaaagtgcctcctgaggccacacagagctgggcatagcatcatttctgtggcactcctgctaaggcatgacccaactattcctgatgaaacatcagacagaccc

SEQ ID NO: 4612 - DNA, 997 bp, Homo sapiens
  source 1..997: mol_type = other DNA
tttcactttgcatggtttcaatctgcattaatttcaattctcgtattttagttaaataaaaccagttccccaacgtcacagttcaaatcttagttaccatagtatattaactgtaattaaataaagtgcaaacctcatagttaggtcttcattccccaaatcactctgtaaatagcaggtgctcatcatgatcaatgaccaatcatgccccttctttccatgtctgctggtgatggttctgtgcacatttattattcagttttcacacagacaggaaaggttgtccttgtgttgcctccccaccaagagtgataactcatgtggaattttacaaaaatagatttaaaagatggaattagtcaacaaagatggaaacacagcagggcaatgaaaagtggcagtcaaattagaatcaagcatgtgtagaagaaatagctgatggtggggatgttgacactgctcgtgatctgggaggagactctggataggccaacaggaacccagggaaggcagacttatcagcataaatgaggaatggggttttgacagaaaggacaaagatatcccataggaagtgatatcatcaaaaagctttacattaaaggagttctcagaaagcacaaaggataaaatgttggaagctgacccaaacttacaaagggcagttagccaaaccataaaaaagatgctcacgccatactgtatgctgtgtgatgagatgaagtcacacaccattcagactactcctgatacatttttaaaactgaaagactgaaagtctaaaacctcagtgtgtttatgttgtcagttactgttttatagtgttcatttcccttcacatttataactgacgataagcgagttttaacgctttgacaaaaagttttaaaaggtcacagaagagtcataatttttgccgttgattattaagtactcattgcatggttttgggttatatggttatttgtacagccataacctcacaaagcagggactg

SEQ ID NO: 4613 - DNA, 1282 bp, Homo sapiens
  source 1..1282: mol_type = other DNA
tgaggtgctgctgtaacaaatacctaaaagtagaaaagtggctctggaattgggcagtaggtggaggctggaagaattctgaggagcatgccagaaaagaagctaaactgccttaaacagactgttagtagaaatatggaatgttaatgctagggcggccttgaagaaaggagcataatagagaatacctcgattgccatagaatatctaaatcatcatgaatagactgttggtaaaaaatgaggaatatgttactggagaagtggaggaaaggagtccttgttacatagtggcgaaaagctaagctgagttgtgtcctgccgttatgtgtaaagcagaacttttaagtgatgacttcaatatttagctgaggatatttccaagcaagctgtggaaggtacagcctgctgtcttcttgctgattatagtaaaatgtggaaagaggtagattgagggaagacctgttaaatataaagaaaccaggacttgatgatttgggaaattcgcggcctattcaaatggcaaaagccactaaaactaagattcaccgtcaggacagcctttactctagagaaagtgatgaagatatggctgtataaccttttgctaatacttcagaaacatcaaaaggtctgaatatcaggtcacacacaagactctttgaagatattaagggtgtgaatcatagatcctctcagctatttcagaaaaagccaaaaacagagacaggattttccaggaaagatacgtgaggagcctcctatctaaatgagtgcatccctgtgacatatgtaaaagacccacaagtttcttgacaacgttatagcagcagaagcaccaccatttttaacagaaagctttagagaatataaaagaagaacaaactgataagttgatactcagctgcaaacgtgtgctaccttttgtgaaaaagtaaagatgactctgagacagtcaacaagcccagagaacagcagtgagctgaagattactcccaggccttgaaacttaaagaagggtgcctcgctggttttgtaaattgattggtgctgatggctcctttttccatctgtttctgctttttgaacaggaacgtgtgtaactattattgtctgcctgtcatgccatcatacttgggaacagataacttgttttctaggttcacaagtgcacagttggaattatgtcccagaaatcacacacagatcctctcccaaacttaatttagatggcttcaatgtgagatttgagacttttgagttggtgagactcagataagatt

SEQ ID NO: 4614 - DNA, 449 bp, Homo sapiens
  source 1..449: mol_type = other DNA
caacagcccaaagttggaaggagcacaagtgttcactgatggatgaatggataaacagaatgtggtctaaacataccatgaaatattctccagcctttaaaaggggaggaagttctgatgcatgctacaacatggatgaaccttgaggacattatacaagtgaaataagccaggcagagaaggataaatgctgtatgattctactcatatgaggtacctagagtagtcaaactgatagagaaagtagaatgttggttgctaggagctgtggggatgggaagatgggaagttgtttaatgggtagagtttcagatctgcaagatgaaaagggttctagtgatggatggtagtgatggcttgcaccacaatgtgaatgtcctttactaactgcacatttcaacatggttaagatagcaaattttcactgtgttttttaccagaatttaaaa

SEQ ID NO: 4615 - DNA, 372 bp, Homo sapiens
  source 1..372: mol_type = other DNA
gtgcaggatgatgccacttcatcttggatgctaatctgccatgttgacttctgattaaccccaggcccaggaatgcctcaagatttctactttacttactgttgcttgtgtaagccaagacaaccttgatgttatcataaacgtgtacttacctaagtcctgtcctttggcaaattatgggctatgagacacagcattcttgcctttccctgaggggtcagtttcagcgatcctacacattccttctgaagcacgtatgctctttctatatggtatgtaagctctgggtctggggagtaacagtgcagagatctacctgtcttgttgccacatgtttctaaactttccaataaatcaccttctactgacaaa

SEQ ID NO: 4616 - DNA, 3773 bp, Homo sapiens
  source 1..3773: mol_type = other DNA
ggtggctgacaagatgactaaataggaacagctccggtctgcagctcccagcgagatcaacacagatttctgcatttccaactgcggtacccgactcatctcattgggactggttagacgtaggtgcagctcatggaaggccatccgaagcagggtggggcattgcctcacctgagaagctcaaggggtcagggaacttcctcccctagccaagggaagccatgagggactgtgccctgaggagcagtgcactctggcccagatactatgcctttctgatggtcttcacaaccagcagaccaggagattccctcaggtgcctatgccaccaggacccagggtttcaagcacaaaactgagtggccctctgggcagacatagagctagctgcaggagttttttttcataacccagtggtgcgtggaatgccagcaagacagaaccattcgctctccagaaaagggggctgaagccagggagccaagtggtccagctcagcggatcccactcccgtggagcccagcaagctaagaaaccactggcttcaaattctcactgccatcacagcagtctgaagtccacctgggactctggagtttggtgaggggaggggcgtccaccattactgagacttgaatagatggtttttccctcacagtgtaaacaaagccccccgggaagttcgaactggatggagcccaactcagctcctcaaagctgctgtagccagactgcctctctagattcctcatttctagccagggcatctctgaaagaaaggcagcagccccagtcaggggcttatagataaaactccctgggacacagcacctgggggaagggacggctgtgggcacagcttcagcagacttaaacactcctgcctgccagctctgaaaagagcagtggatttcccagcacagcgttcaagctctgctaagggatagactgccttcttaagtgagtccctgacccccatacctcctgactgggagacacctcccagcagggttcaacaagcacttcatataggagagctccagctggcatctggcaggtgcccctctgggacaaagcttccagaggaaggaacaggcagcaatctttgctgttctgcagcctccgctggtgatacccaggcaaacagggtctggagtggacctccagcaaattacagcagacctgcagcagacgggcctgacctttaaaaggaaaaccaacaaatggaaaggaatagcatcaacatcaacaaaaatgacatacacacagaaaccccatccaaatttcaccaacatcaaagatcaaaggtagatacctccttgaagataaagaaaaaacaacacaaaaggctgaaaattgcaaaaataggaacccctcttctcctccaaaggatgaaaactccttgccagcaagggaataaagctggacaaagaatgagttagacgaatttacagaagtaggcttcagaaggttgataataacaaactcctccgagctaaaggagcatgttttaacccaatgcaaggaagcgaaaaactttgataaaatgttagaggaattgctaactagaataaccagcttagaggagaacataaatgccctgatggagctgaaaaacacagcctgagaacttcgtaaatcttacacaagaatcaatagctgaatagttcaagtggaagaaaggatatcagagattgaagatcatcttaaggaactaaatcaagaaggcaagattagagaaaaaagaatgaaaaggaaccaacaaagcctccaagaaatatgggactatatgaaaagaccaaatgtacatctgattggtgtacctgaaagtgatgggagaatggaaccaagtgggaaaacactcctcaggatattatccaggagaactttcccaacctagcaagacaggccaacattcaaattcaggaagtacagagaacaccacaaagatactcctggagaagagcaaccccaagacacataatcttcagattcaccaaggatgaaatgaaagcaaaaatgttaagggcagccagagacacgaaaaacccttcaaaaaatcagtgaatccaggtgctggttttttgaaaagattaacaaaatagactgctacccagcctaataaaggagaaaaggtagatgaatcaaatagacacaataaaaaataataaaggtaatatcaccactgatcctacagacatacaaactaccatcagagaatactataaacacccctacacaaataaactagaaaatcttgaagaaacggataaattcctggacacatacatcctcccaagactaaaacaggaagaagtcaaatccctgaatagaccaataataagttctgaaattgagaccgtaactaatagcctaccaacaaaaaaagcccaggaccagacagattcacagctcagttctaccacaggtacaaagaggatctggtaccattccttctgaaactattccaaacaacagaaaaagaaggactactccctaactaattttatgagaccagcatcatcctgaaaccaaaacctggcagagaaacagcaaaaaaagaaaattttaggccagtatccctgatgaacatcgatgtgaaaatcctcaataaaatactgacaaaccgaatccagcatcacattaaaaagcttgaccaccatcttcaagttggcttcattcccaggatgcaagtctggttcaacatatgcaaatcaaaaggcataatccatcacataaacagtaccaatgacaaataccacatgattatctcaatagatgcagaaaaggccttcgataaaattcaacaccctttcatactaaaaactcttgctaaactaggtattgatggaacctttctcaaaataataagagctgtttatgacaaacccacagccaatatcatactcaactggcaaaagctggaagcattccctttgaaaactggcacaagacaaggatgccttctcccaccactcctattgaacatagtattggaagttctggcaaggttaatcaggcaagagaaagcaaaaaaagggtattcaaataggaagagaggaagtcaattgtctcgatttgcagatgacatgaccatatatttagaaaaccctgttgtctcatcccaaagtttccttaagctgataagcaacttttgcaaagtctcaggatacaaaatgagtgtgcaaaaatcacaagcattcttctccacaaataataaacagagagccaaatcatgagtgaactttcattcacaattgctacaaagagaataaaatacctaggaatacaacttacaaaggatgtgaaggacctcttcaaggagaactacaaaccactgctcaacgaaataagagaggacataaacaaatggaaaaacattccgtgatcatgaataggaagaatcaatatcatgaaaatggccatactccccaaagtaatttatagatttattgctatcctcatcaatctcccattgactttcttcacagaattagaaaaaactactttaaatttcatatggaatgaaaaaagagcctgtatagccaagacaatcctaagcaaaaagaacaaagctggaggcatcacgctacctcacttcaatctatactacaaggctacagtaatcaaaacagcatggtactggtatgaaaacagatatgtgtatatatatatatatatgtgtgtgtgtgtatatatatatatgtgtatatatatatatggcataaataggattccctatttaataaatggtttttctgttgtttggaata

SEQ ID NO: 4617 - DNA, 2198 bp, Homo sapiens
  source 1..2198: mol_type = other DNA
ggggtgagtggatacagcaacttcaactgaattatccagctatccacagtgggattggtcagggaaataacccaactcatggagaagaaagaaaagcagggtagggcgatggcccacctgggtgtgacacagggccaagggaacccccatatccagttaaaggaagcagtgagtgattgtgcgaccctgggaaaccacgcttctcccacagatctttgcaacctgcggatcaggagatccccttatgagcccacaccaccagggccttgggtccgacacacagagctatgtggagtcttggcagagaagctgctcaggcatgcactgagacccaggagctttacatactccagtcctgggatccccaacaaaggtgtctgcagcccaggcaatgcacggtgtctgtacatacccctaggaagggggctgaacccaaggagccaagcagcattggcctgtgggtcccacttccatggcacctcacaagacaagacccactggcttggaattccagccagcctgcagtaaaagggtgcctgcctgagaagaaatggggccctgaggggaggggcaggctgccatctctgctgtttggttgactcagctgttccagcctgtggactttgaagagtccaaatggtctggatgaggaagagtttccccagtgcagcatagctgctttgccagaatgtggccagattgcttctgtaagctggacctcaaaccattccccctcattgggtgagacctcccagctgggcctccagctacctcaacctgcacatacggtatgaacagttctgatctttccctgggatgaagtgccctgggggtggggcatgtcactaccttggctgttcaagcatcttagccagtccagcttgtgggctttggggtgctcaatctgatcagaggctgaagagatccccaacacgcatgctgctctatcaaaaagcagccagactgcttctttaagcaggtactagatcacttttcttctgactgggtgagacctcccaaacaaagtcttcaggtacctcttacaactgcatttggcctggcaacaggtccgtaccccccgggatggagcttccagaggaaggggcaggctgccatctttgctatttcgcagacttcggtggtgatacctccaggtacaggaaaaacggaggtaactagggtctggagcagactcccagcaaaccacagcagccctatgcaacagccatcagactgttcaaagaaaaacaacaacaacaaaaaaaacacagaaaacaacaacaacaagaaaaaatccctgtgagaaccccatccaaaggttggcaacctcaaagatcaaaggtagataagcccacaaagatgagaaagaatcaactcaaaaatgtcaaaaactcaaaaaaccagagtgccccctttcttctaaatgactacagtgcttctgcagcaagggcttaaaacagggctaaggctgagatgctgaaatgacagaagtaggcttcagaatgtggataaaaatgaacttcgctgagctaaaggaatatgttttaacccaacacaaagaatctaaaaatcataataaaacaatgcagaagctgacagccaaaatagcaagtttagagaggaacatgatagaactgaaaaacacagtataagaacttcacaatgcaatcacaagtattaatagcagaatagatcaagtggaagaaagaatttcagagcttgaagactgtttttctgaaataagactggcagaaaagaatagataaaaaagaatgtaaaggaatgaacaaaacctccaagaactatgtgattatgtaaagagatcaaatctatgactgattggggtacgtgaaagagacagggagaatggaaccaatttggaaaacatacttcaggatatcatccaggagaacttcctcaacctggcaacacaggccaacattcaaattcaggaaatgcagagaactccagtaagatactccatgaaaagattatccccaagatacataatcatcagatctctaaggtcgaaatgaaacaaataatgttaagggcagcaaataatgttaagagaaaggcaaggtcacctacaaagggaagcccatgagaataacagtgatcctctcagaagaaactctacagccagaagagattggggccctatattcaacattcttaaaggaaagaatttctggtcc

SEQ ID NO: 4618 - DNA, 229 bp, Homo sapiens
  source 1..229: mol_type = other DNA
agaacagaccaaattatcagtgatgatgaaaattagcacagtggttgtctgtgagaatgtaggcattgcctgaaagagggcataagggaattttttaaagtgacggaaatgttctgcattttgattgaggccttggttacatgggtatgtacatttttcaaaactaatcaaatcgtaccattaatatttgtgcattttaccatatgtaagttttatgccagttaaaaaa

SEQ ID NO: 4619 - DNA, 139 bp, Homo sapiens
  source 1..139: mol_type = other DNA
tctctgaaggcctccatttccccctctgcagattgggaataattgtgctttcttccacaggggttttgtgaagataagagataacggatgagaaagcactttcaaaagttcaaattattataccaaagcaagggattat

SEQ ID NO: 4620 - DNA, 74 bp, Homo sapiens
  source 1..74: mol_type = other DNA
aggttgaaccatatgaaattgatgctcaattgtttttgacctacaaaaatgtcaactttttctggttcaagcta

SEQ ID NO: 4621 - DNA, 176 bp, Homo sapiens
  source 1..176: mol_type = other DNA
ttgaagcctgacactcacataagttaggtgccttagtctaatcatttaacctctttgaattggcatctattaagtggatagggccacctaatagagtttttagaaagattaggatgatatatataaattgcctagtatcatgcctgaaacataggcatttaatagatgatagctat

SEQ ID NO: 4622 - DNA, 88 bp, Homo sapiens
  source 1..88: mol_type = other DNA
aaggttaataaatgattttcatcccaaacactaaacatgattgatgggtagaggctgcccgaagtactgtgtaaagatggaatctgag

SEQ ID NO: 4623 - DNA, 126 bp, Homo sapiens
  source 1..126: mol_type = other DNA
gctaggtgtggtggcatgtgcctgtcatcccagctttcaggagactgaggtgggaggatggatctcttgaacccaggagtttgagaccagtctgggcaacacagcaaaatcctgtcttaaaaacaa

SEQ ID NO: 4624 - DNA, 297 bp, Homo sapiens
  source 1..297: mol_type = other DNA
gccgggcacggtggctcatgcctgtaatcccagcactttgggaggccaaggcaggcagatcacctgaggtcaggagttcgaaaccagcctggccaacatggcgaaaccccatctttactaaaaatacgaaaattagccaggtgcggtggtgcatacctgtaatctcagctacttgggaggctggggcaagagaatcacttgaacctgggaggcagaggttgcagtgagctgagatcgtgccgttgcactccagcctgggtaacagagcgagacttcgtctcaaaaataaaaaaaaaa

SEQ ID NO: 4625 - DNA, 1998 bp, Homo sapiens
  source 1..1998: mol_type = other DNA
agagcaatcgggcaagagaaagaaataaagagcatccaaattggaaaagaggaagtcgaactatcactgtttgcctatgatatgattgtatagctagaaaaccctaaagactcatccaaaaggctcctagatttgatgaacaaatttagtaaagtctcaggttacaaaatcaatgtacacaaatcagtagctctgttatacaccaacaaagaccaatctgagaatcaaatcaagaactcaatcccttttacatcagctggaaataaaataaaatacctagtaatatatacttaaccaaggaggcaaaagatgtctacaaggaaaactacaaaacactactgaaagaaataataagtgacacaaaaaaatggaaacacatcccatgcttatggatgggaagaatcaatattgtgaaaacgaccatattacccaagcaatctatagattcagtgcaattcccataaaaataccatcatcatttttcacagaatgagaaaaacatcctaaaattcatatggaaccaaaaaagagcccacatacccaaagcaattctaagaaaaaagaacaaatctggaagcatcacattactggacttcaaattatactacaaggctgtattaaccaaaagagcatggtactggtataaaaatattcacttagaccattggaacagaatacagaacccacaaatactaaataccacaaaagctaaatacttacagtcaactgatcttcaagaaagtatacaaaaacatgaattggggaaaggacaccctattcaataaatggtgctgggaaaattggcaagccataggtaggagaatgaaactggatacccttttctcaccttatacaaaaatcagctcaagatggattgtacacttatacctaagacctgaaaccataaaaattctagaagacaacactggagaaactcttccgaacattgacttaggcaaagacatcatgactaagaccccaaaagcaaatgcatccaaaacaaaaataaataaatgggactcacttaaactaacaagcttctacacagcaaaataaataatcagcagagcaaagagataacccacagagtgggagaaaatattcacgaaatatgcatctgacaacggactagtagccagaatctacaaggagctcaaatcagcaagaaaaaaaaaatcccatcaaaaagtgggcaaaggatatgaataatcatttcttaaaagaagatacacaaatggccagtaaacatatcaaaaaatgttcaaaatcactaatcatcagggaaacgcaaattaaaaccacaatgaaatatcaagatatcatcttactcctgcaagaatggccataattagaaagtcaaaaaacaatagatgttggagtggatctggtgcaaagagaacattttacactgttagggggaatttaaattagtacgaccactatgcaaaacagtacagagtttccttaaagaactaaaaatatctaagctatcccactactgggtatctacccaaaggaaaaggagtcattatgtgaaaaaggcacatgcacacacatgtttatagcagcacaatttgcaattacaagaatatggaaacagcctaagagtccaccgaataatgagaagataaagaaaatgtgatatatatacaccatggaatactactcagttataaaaaggaaaaaaaaatgtcttttgcagcaacttggatgaaaccggaggccattattctaagtaactcgggaatggaaaaccaaatactgtacgttctcacttttaagtgcgagctaagctatgaagatgcaacaacaaactgagtgatataatggactgtggggtgtgaggtgggggtgattgggaagggggtgatagataaaaaacaacatattgggtacagcgtacactgctcaggtgacaggtgcactaaaatctcagaattcactatgaaagaactcattcaatagttttgtatacccccaaaactattaaaataaaaa

SEQ ID NO: 4626 - DNA, 663 bp, Homo sapiens
  source 1..663: mol_type = other DNA
aaagcttatgtccatgtagaagcctgcatatggatgtttatagcagctttatttataactgccaaaacttggaaggaactaaaatctccttcattcagcagggaaatggataaactatggtatatccaaacaatgaaatattattcaaaactaaaaaagaaataagctatcaagccatgaaaagacatggaggaaccttaactgcaagttactaagtgaaagaagccaatctgaaaaggctacatattgtatgattccaactatgtaacatttgagaaaaggcaaaaatatggagatagtaaaaagatcagaggttgccaggatttatgggggagggagagacagataggcaaaaacacagaggattttaggacagtgaaaatactctgtatgacactataatggtgaatatacatcattgtatatttgtccaaacccatggaatgtacaccaagagtgaaccctactgtaaactacagactttgggtaataaggatgtgtcaatgtaggttcatcaattgtaataaatgttacactctggtggaggatgttgtgatgggggaggttggtgcctgcatggggcaggtggcatatgagacacttctgtagcttcctgttaattttgctgtgaacctaaatcctaacaatatgatctttctaaaa

SEQ ID NO: 4627 - DNA, 286 bp, Homo sapiens
  source 1..286: mol_type = other DNA
ctatgtgagagacatgtggcaggaactctgggttgcacctaggagatgagagtagctcctggctgaaagtcagtcagaaaatagggacctcagccatatagctgcagaaaattagttctgccaacaacccaaatgagcttggaagcagattctttcctagtccagcctccagatgagaatgtaacccagccaacaccttgatttgtagccttgtgagactgggcagaagactcagctaaaccgtgcacagacttctgacacataaacactgaggtacttaatgtgt

SEQ ID NO: 4628 - DNA, 341 bp, Homo sapiens
  source 1..341: mol_type = other DNA
gatatggtttggctgtgtcctcatcgaaatctcaccttgagttataataatccccacttgtcaagggcagggccaggtggaggtaattgaatcatgggggaagtttcccccatactgttctcgttgtggtgaataagtctcagaagatctgatggtttttcccctgcacaagctctcttgcctgctgccatgtacgatgtgtcttgcttcccctttaccttcaaccatgattgtgcagcctctccagctatgtggaaccgtgagtaaatttaacctcttttctttataaattacccaatctcaggtatgtctttattagcagcatgagaacagatgataca

SEQ ID NO: 4629 - DNA, 295 bp, Homo sapiens
  source 1..295: mol_type = other DNA
ggctgggtgcagtggctcatgcctgtaatcccagcactttgggaggccgaggcaggtggatcacaatgtcaagagatggagaccatcctgaccaacatggtgaaaccccgtctctactaaaaatacaaaaattagctgggcgtggtggcgcatgcctgtagtcccagctacttgggaggctgagacagcagaatcacttgaaactgggaggcagagattgcagtgagccgtgattgtgctactgcactccagcctggtgacagagcgagactccatcaaaaaaaaaaaaaaaaaa

SEQ ID NO: 4630 - DNA, 187 bp, Homo sapiens
  source 1..187: mol_type = other DNA
agaaaggacagtctcttcaacaaaggaagctggaacaatatccatatggataagaagctcactgttaaaccatacacaaaaatcaatttcagatggttcacagaattcaacttaaaatgcaaaataaggctactagaagaaaacaaattattttcataccctcactgtaggcaaagatttctcagca

SEQ ID NO: 4631 - DNA, 134 bp, Homo sapiens
  source 1..134: mol_type = other DNA
ccaggtgcagtggctcacacctgcaatcgcaacactttgggagggagatcacttgaggtcaggaatttgagaccagccgggcactccagcctgggccacacagcaagactctgtctcaaaaaacaaaacaaaaa

SEQ ID NO: 4632 - DNA, 285 bp, Homo sapiens
  source 1..285: mol_type = other DNA
ggccgggcgtggtggctcacgcctgtaatcccaatactttgggaggccgaggtgggtgggttacttgaagtgaggagttcaagaccagcctgaccaacatggtgaaaccctgtctctactaaaaatacaaaaattggccaagtgtggtggtgcatacctgtaatcccagcaggaggctgagccaggagaatcgcttgaacatgggaggcgaagagtatggtgaaccaagatcatgccactgcactccagcctggacaacagagtgagactctgtctcaaataaaa

SEQ ID NO: 4633 - DNA, 286 bp, Homo sapiens
  source 1..286: mol_type = other DNA
gctgggagtggtgcctcatgcctgtaatcctagcactttaagaggccaagatgggggatcacttgaggccagaagttcaagacaagaagttcaagacagtaagaccccatctctacaacaaacaaaaacaaaattagccaggcatggtggagcacacctgtagtccgagttactcaggatactgaggtggggaggatcacttgagcccaggagtttgaggctgcagtgagctatgatcttgccactgcaataatgagaccatctcaaaaaaaaaaaaaaaaaaaaa

SEQ ID NO: 4634 - DNA, 614 bp, Homo sapiens
  source 1..614: mol_type = other DNA
tgagttgcttcttatggataagcaaagaaagtggtttcttgagatggagtttatacctggggaaatgctgtaaacattgttgaaaagatagcaaaggatttagaatatcccataaacttaattgataaagcaatggcagggtttgagactgttgactccagttttgaaagaaggtttactcttggtaaaatgctatcagaaagcttcgcatgctacagagaaatctttcatgagatgaagagtcaatccatgcagcaaactttgttgttgttataagatattgccacaaccaccccagccttcagcagtcatcaccctgatcagtcagcaggcatcaacatcaaggcaggaccctccactatcaaaaagattataactcactgaaggctcagatggttgttagcattttttagcaatcaagtaatttttaattaaggtatgtacattgtttttaaggcacagtgctattgcacacttaatagactgcagtatagtgaaaatataagttttatatgcactggaaaaccaaaaaagttgtgtaacttactttattgtgatatttgctttattgcagtggtctggaacctaacctgcagtgtctctgaggtatgcct

SEQ ID NO: 4635 - DNA, 1670 bp, Homo sapiens
  source 1..1670: mol_type = other DNA
ctgtaatacagtaatagtaggggacttcataaccccactttcaacaatggatagatcatctagactgaaaatcaataaagaagcattggacttaaactgcaccatagaccaaatggacctaactgacatttgcagaacatttcatccaacagctgcaaaatacacaatcttctcagtagtacatgaagcattcttcacagcagatcatatgttaggccacaaaataaattttaacaaacttaagaagatagagatcctatcaagaatcttttctgaccacaatggtgtaaaattagcaattaataacaagaggaaactcagaaattttataaatacatggaaattaaacaacatgcttttgaataaccacagagtaaatgaagaaattaaaagagatatttaaaaaattattgagacaaatgacaatggaaacacagcataccaaaagctatgggatacagcaaagcagttctaagaggaaattttatagcaataaatgcctacagcaaaaaataagaaagattccaaaaaaaacctaacattacacctcaagaaactagaaaaattaaacctaaaattgatcaaaggaaggaaataataaagataagtgcaataataaatgaagtagagactaaatacatacaaaagatcaacaaaacaaagagttggctttcataactcagggctaatgataagatcaataaacccttagttagactaagtttttttaaaaagaggatacttaaataaataaaatgataaatgaaagaaaaagacattgcaactgaaacaacagcaatacaaaggattgtaagagactattatgaacaattatattccaacaaatttaataacccaagagaaatagataaatccctggacacatataacttaacaaggttaaattatgaagtagaatagacttgtaatgagtaagaaaattgattcagtaattataagtctccatcagagataaacccagaacctaatggcatcactgctgaattctaccaaatattaaaagaaataataccaattcttctcaaactattccagaaaattgaagtggagggaaaacttccaaactcatttgacaaggccaccattattctgataccagaaacaaagacactacaaggaatactgcaggccaatatacctgacaaacatagaagcaaatgtcctaaacaaaatactagcaaaccaagttcaacagtacattaaaaatgtcatccaccataatcaagtggaattcatcccaggatgcaggaatgatttattggaagtaaagcaatatatgtgatacaccacattaacagaaaaaaaggacaaaaccacatgatcatcctaacggatgcagaagaagcattcaacaaaattcaacacctcttcataataaaaactctcaacaaattttgtagacatacctcaacacaataatggcaatatatgacagacccacagctaacgtcgtactcagtggagaagcttttcctctaagatcaggaaaaaaacaagaattcccacttttactgcttctattcaacatgtgctagaattccccatcagagcaatttggcaagataaagaaataaaaagcacccaaattggaaaagatgaagtccaattatctttatttgcatataacatatcatatatagggaaaaccc

SEQ ID NO: 4636 - DNA, 29 bp, Homo sapiens
  source 1..29: mol_type = other DNA
ctccttcatttgcaggacatcaagggctc

SEQ ID NO: 4637 - DNA, 6273 bp, Homo sapiens
  source 1..6273: mol_type = other DNA
ttcaaaatggatgactagatacctcctccacagagaggaacaaaaataggaagcagacatccatgctttgaatagatcatctaagagtgaatactgggattcaacagagtgacagaaagtaccaaaagcaagtaaggagagggatgcaaggcagcttgctttactaggaccagctgggaaagcagtaagaagctcccagatgtgaggaaagagtaagagagaaaccaaactctcagggctgcacactcctgccagtgttttacagtcttaactacaagagaacccctcaacccatgtgggcctcgagactaacctagggagctgcctagagactacacggagacattgctccagagaagaaacttatatggagtcccacaagcatccaagcccacagcagctgcagcttggtgcccttctgaggatctaagctctgaaggtctgaatcctaccctggagccaggctgacattgccactgttgctgccaagccaaaaagggagaggagaggtcaggtattgccacataccttaaggacaaatcccactgctgctgctgtggactgctgtgggatcgaggcatgagtaaaccacactccccatagctacctacccgcactgtttcagctgagaggggcactgtcctccttggtggcagaactgcagtgcagccaccagtgcctggatctgaggattctgccagcagcctcacttctgcctaccacagtcagtgcctgaatgtactatcagggggcctgaaagccagactaccagcccaattgcatcccctcagtactagagcatgccattcggggaattacccatctcaggccagtctaccatcattggcacctgattactcctactggagtctcaggtcaggctggcccaacctaactataccaccacagctggaactcatccacatgcatcaccagtgagccagaagactggccagctcaatctgttgtagcaactaccaacaccaggatggactacttgggttccagtaggtttctctaccataactactgccatcaccccagttgctcaggggcccaagaacacacccacatgcccagtccactgctgccactaccagtatctaagcaagccacctgggggccccaaaattggaccttctagacccacctcactaacactggtgccagtgtctcttgggcccccaaacaggcatgctcagcccactacctccaccactggggcccaaagactagtctatctggcattctagtccccagcaaaacttcaccacagcttctactcataaccacaccctaagccaaagaggaaatcaggaatactactaaacctgtttacagctgaagatcacacaactgcaggcacccaaaatcaaagccaaagtactgtatccaccaactttgttaatatatatatctgtcttcaggaaaaagtcttctactaaaaaagcaatctcaaaaaattaaaagaagcaactgttacaccagatgtgcagatatcaatgtaaaaacatagaaaacatgaaaaagcaagaaaatatgattccatcaagggaacacaataattctccagcaagagatcccaatcaaaatgaaattccagttaaggaattcaaaatactgattttaaagtttagttcgatatgagagaattctgcaaaccaatacaaagaaatcagaaaaacaattcaggatgttaatgagaaatttatcaaaaagatagatattttgtaaaagaacaattagaaattctggaactgaagaatccatttaatgaaatacgaaatacatttgaaagcttgaacaatagactagatcaagcagaagaaagaatcttgaaacttgaaatattttgaaataagcctgtcaggcaaaaataaaggaaaaaaaattctaaagaatgagcaaaacttttttcaccctaggaacaatataaagtagccaagtagtcaaattattggtatccctgagaaaaaagagagaatgaaagggttagaatatttatttaattaaataatagatgaaaactcccaagtctagcaagagatttagatatacagacatgagaggctcagcaattccaaggaagatgtaatgcaaaaaggtcttcttcacagtacattacagtcagattgtatgaagtcaaagataaacagtgagtcctaaaagtattaaaagtgtctagtcacatataaagaaacctcaacagattaatgtggatttctcagcagaaacctaacaggctggaagagaatgggataatatatatattcaaagtgctgaaaaaaaggtaccctatcaaccaagaatactgtgtctagaaaaattatccttcttaaatgaaggagaaataaaatactgagggaatttgttaccactaaactggcctacaagaaatgatcacgggagttctaaacctagaagtgaaaggatgacatttaccttcatgaagacacatgatagtataaaactcattggtaaagcaatcatacaaaggaggaagataatggattcaaatgataccaccacagaaatctaccaaatcataaagactaacaataagagaaaaagaaactaatagagaatataaaaaataaccagaaaataattaagaatgtgaaaattacaaagactcacatatcaattataactttaaatgtaaagaattatattctccctgcttaaaagatacagaatggctgaatggatttttaaaaaatgatccaacaataggttgcttacaaaaaaattcacttcccaataaagacgtatatagactgaaagtaaacggatggaaaaagataatctatgccaatggaaaccaaaagtaagcaggagtagctatacttatataagatcaaaaaagactaagtcaacaacaattaaaaagacaaagaaggtcattatataatgataaagggatcgatccagcaagaggacataacaattctaaataaatatgcacccaacaatggatcactcagatgtataaagcatatattgctggatctgaagacagagatagaccaaaatacattgatagcaggagacttcaacatcctactctcagattagacagatcatctagaaggaaaataaacaaagaaacattggatttaaactggactttagaccaaatggacataacagacatttacagaaattctacccaaaaactgcagtatatactttcttttcatcaggatatagaacatttccctggattgaccatacgttagactgcaaaagaagccccaacaaatttttagaaatcaaaatcatgtcaagtatctgctcagaccataattgaataaaactaaaatttaataccaataactttggaaactacacaaatacatggaaattaaacaacatgttcctgaatgaccatagggtcaatgaagaagtgaagatggaaatcaaaaaatttcttgagacaaatgaaaagagaaataccatgccaaagtctgtggaatacagcaaaagtaatactaagagggaagtttatagcattaaatgcctacatcaaaaaaagtagaaagtttacaaattaacaatctaatagttcatgtcaaggaagtagaaaagcaggaacaaatgaaatccaatttagcagaagaaaacaaataataaagatcaaggcagaattaaatgaaataaagactacaaacaatacaaaggaaaaatgaaacaaaaaactggttcttcagaaagataaacaaaattgatagaccgctagatagcttaaccaagaaaagaagagagaagagccaaataaagtcagaagtaaaaaaggaaatacaaaacttatcagagactactatggacaactatacactgaccaactggaaaacctagagcttgatgtacaaaaatccttaacaaaatactaccaaatcgaatccaacagcacatcaaaaacataatataccacaatcaaatgggacttataccagggatgcagggatgattcaacatatgcaaacaataaacatgatacattacatcaacagaatgaaggatgaaaaccatttgatcacctcaatagatgcaaataagcatttgataaaattaaacatcccttcaagataaaagccttcaacaaactaggcatggaaggaacataactcaaattaatagcagctatgtatggaaaacccatagctaacattgtactgaatgagaaaaagttgaaagcatttcctgtaagaactaaaacaagatgatgatgcccacttttaccactcctagtcaacataatactggaagtcctagccagagcagtcaagcaacagaaagaaataaagggcatccaaattggaaaagtggtagtctcattgtcccactttgctgataatataatcttatacttagaaaaacctaaagactctaccaaaaaactcttagaattgataaacaaattcagttaagttgcaggatacaaaataaacctaccagaaatcagtagtgtgttttttacactaataatgatttagctgagaaagaaaacaagaagaaaagcccatttacaatagctataagaaaaataaaatacctagtaataaatctaaacaaggaggtgaaagatctctacaaggtaaacttaaaaacactgatgagagaaacacaaacaaatggaaaaatatcccatgctatggatgaagaattaatatcattaaaattatcatattgcacaaagcaatctacagatttaatgcaatgcttgtcaaaatatcaacataattcttcccagaattagaaaaatcatcctaaattcatatggaaccaaaaaagagcctgtatcgccaaagcaatactgaacaaaaagaacaaagctagaggcatcacattatttgacttcaaaatgtattgcaaggctatagtaaccaaaacagcataaaaatagacacataaaccaatggaaccaaatatagaaataaatccacttatttatagccaaccgctttttgataaagcccacaagaacttacatttggaaaaggaccaccttttcaaaaaattatgctaggaaaattggatagccacattccaaagaatgaaactggacccctatctcttaccatacacaaaaataaactcaaaatgggctaaagacttaaatgtaagacatgaaaatataaaaacactagaagaaaacctgaagaaaactctcccggacattggtctaggcaaataatctatgactaagacctcaaaagcccaggcaacaacaacaaaaaaggcaaatagaacttaattaaactaaaaagtttccacacagcaaaagaaatactcgacagagtaaacagacaacctgttgaatggaacggaatatttgcaaactattcatctagcaggggactaatattcagaatatacaaggaatgcaaccacctcaacaacaacaacaaaataatcccattaaaaagtgggcaaaggaaatgaagagacatttctcaaaagaagacatataaatagccaacaggtgtattaaaaaaatactcaacattacttgtcatcttaccccagtctgaatggctatcattaaaaagacaaaaaaaaaataacatatcttggtgaggatgcacagaaaagggaactgttatacactgttggtggaaatgtaaactagtcttccactgtagttaacactatgaagatttctaaaatagctaaaagtagaattaccgtttgatacagcaatctcactattcgtgtctacaaaatcaatgtatcaatgggatacccacactcacatgtttattgcagatttattcacaatagcaaagttgcaaaatcaacctaagtatccatcaatagatgattggataaggaaaatgtatatatacacaacaaaatactttattcagccacaaaaaaaagaacgaaatcatgtcatttaaaacaacatgaatggaaggtcattatcttaagtaaaataagccaggcacaaaaagacatatcacatgttctcacttacatgtcagagttaaaaaatttgatcacatgggggtggagagtggaaaggtaggtaacagagactaggaagggtgaatatcggagagcaaggatgaagagcaataggttaaagggtatacaagcatacaaattgatagaaggaataaagtcattgtgtgacagcagagtagggtgactatagttaaacaaaaatgtattgtacttgggtaatggacacgctgagtactctgacttcatcactatgcattatacatacctaatgaaatttcacatgtacccagaaatttgtacaaa

SEQ ID NO: 4638 - DNA, 115 bp, Homo sapiens
  source 1..115: mol_type = other DNA
tgataaagtaaatgaggtaaaatttaacaataatctgagcaaaaggtatatgtgttttctttgagacagtctgattcttgcaacttattctgtaagttggaacttatttccaaac

SEQ ID NO: 4639 - DNA, 718 bp, Homo sapiens
  source 1..718: mol_type = other DNA
gaaatgagaaggtttctcttttgcaatagaacgtcatggaccagtgttaaatgtgagtggaaggagttctggaattggaaaaccatcatttttcaaccatcacagtaaatatggctcaggcaagaattatcaatcaatgctaaagctagggggaaatttcgcttaggagcaggatattagggtattagtctgggcttaaagtatctcctcacagattgttgttagtttctggggaaagaatagtaaccatgcaatggaaaaaaatggacaacctcttgactaggttatcaaaattaacctcaccaataaagggtggatgttcaacatgtgccttcaaatgtgacccactgagaaggaaacaacatcactgtaacaacaacaaccagaaacgacagggggttttgactgaattcttcaaaaatgtcaatgtcatagaagacaaagaaaggttgtggaaatgtttcagattaaatgatagtaaaaacacctgacaactaaacatagtaagtaatactagactggattctgtaccagaggtaacataagtgctccaaaggacaatgttaggtcaactggcaaattggaatatagacagtcaatcagataagaagtatactttgattaagtaaaaaaaatccctattcttggaaaatacacaataaagtattttgaggtaaagggccataatgtatgcaatctactctcaaaaaattcagaa

SEQ ID NO: 4640 - DNA, 664 bp, Homo sapiens
  source 1..664: mol_type = other DNA
atgtattatatgattgagcaaatgagaaaacatgttgatgttgatgggagtcaggatgttcactatggaaaaacaaatatacaaatatgaaatgagggaaggcaagaaagaaccatgtggaaatggaatagaattggtataaattcataatttctaaaccatgtatatgtacgtttatatgtattataattgcatacacatgcctccatgcatatatgtgtgtgataatacacatgcatttatgtgcgtgtgtgtatacacatgcatatatttactaatcctatctgccaaaatggcttagacacaaaaacacctcagcagaaatgaatatacctagcactcagatcttcgtgtctaatatagtttgccactaaaaggaaccaaggctacttggaaaaatggatgattccaaagcaagggcaaggtaggaacaagatgagcttgaaatatcttgttatgccagaaagtaatgttaaaaaaaaaaatagaggtatattgccaaaacatagagccagcttgaaggggctcccactggccaaacttgagccaatctgagagcaaaataattgagaaaaataaataacaagataattgagaaaaaaataaaataaattcccaattccattgggaaaaaatagaaatccatgaatccatactgatataa

SEQ ID NO: 4641 - DNA, 308 bp, Homo sapiens
  source 1..308: mol_type = other DNA
ggccgggcgcggtggctcacgcctgtaatcccagcactttggaaggccgaggagggcagatcacgaggtcaggagatcgagaccatcctggctaacacggtgaaaccccgtctctactaaaaatacaaaaaattagccaggcgtggtggcggcccctgtagtcccagctactcgggaggctgaggcaggagaatggagtgaacctgggaggcggagcttgcagtgagccgagattgctccattgcactccaaccaggacgacagagcgagactccgtctcaaaaagaaaagaaaaagaaaaaaaaaaa

SEQ ID NO: 4642 - DNA, 713 bp, Homo sapiens
  source 1..713: mol_type = other DNA
cctaaaggaaaaaacccattttaaaaagccatccagcagaatgccacatccctagaaagacccacttcctggcccttcagctgcttctgtttctcttcacctacaaaaataaaattacagtatacaataaccttttaaaatacagcatcattaagtgggaaactgaaagcctgccattgttgttgccgtttaacagctgatacaggtttctggtgatgctactgttgcctagctaccctgaccacattattttttcactgtatcagtggtgtgtcatatttttttttttgccatccttgttcctgtgcgagttatgtcatattttttactgttaagtacttatgcatgaataagtataagaaaataactgcttattggtagcatatacattcagtcaggaatgatggtgacatcaaccaaccacaaattacccacatgagtggctgagataatgacacctttgctttctgatggttcaaggtatgcaaacttggtctcaatgcacaaaattattaaaaataatgttatataaagttaccttcaagctatgtgcataaggtatatatgaaacaagtgaatttgtgtttaaacttgggtcccatctccaagatatcttattgtgtgtatgcaggtattccaaaatttggaaaaacatcccaaatccaagatgcttctactagtcccaagtatttcagataagggatacacaacct

SEQ ID NO: 4643 - DNA, 181 bp, Homo sapiens
  source 1..181: mol_type = other DNA
aaagcctgtgccctaaaaccatacggacttgaattccaaaccctaatgccaccacttaccagttgtgtaatttgatgaattattcaacctgagtttcctggagaatgaaacagagtaacatcactttaataagtgcttgggagcgttaaataacctaacatataaaaactgtctagcacag

SEQ ID NO: 4644 - DNA, 3627 bp, Homo sapiens
  source 1..3627: mol_type = other DNA
aaagaacacattaagtagaaatatgagtaaatagaatagaatctctttttctattaaattttctaagttttacagttgaagcaaaaattataacactatctgaaatgattctaaatacagatagaggaaatcattaaggcaattatattttaaatgggttagggcaaagggagacataaaggaagcacaagtttctatacttcactcaaactaagaaaatggggacaccagaagactgatgttaagttagatgtatataatgtaacaattaaagcaatcagtcaaacagctgtacaaagatgtgcacttagaaacactgtagataaatcaaaattgaatttaaataatgttacaaaatataaaaatttaaaaatgtagctaaaaagatggcagaaaaaagaaaacagaaaaatgtaaaacagagagaactaacagaaaataaaatgtcagacttaagtcttaacaaatcaataattaccttaaatgtaaatggtcgtcatgcacaattaaaaaacaaagcctggtagggtggattaaaaaatcatccaactatatgctatctacaagaaactcacttcattgcacaatagaggcagattgaaagtaaaagaatggaaaaatacgtattataaaacattcattaggagaaagcagaagctgctatattatacgaaataagttttagagcaaagaaaatgattagagacagagagggatattatataatgataaaaggttctatctactaagaagatatagtaatcctaaatattaggtttactaacacttagtaaacctgtatttactgatacaggtttatatttgcaccaacctatgtattcagtgatcaacagaattgcaaaatatgtaaagcaaaaactgataaaactgaaaggagaaatcgacaagtcaaaagttttagttaaagtcttcaatatcactctctcaacaatttatagggcaactagacaaaatgccataaaggatgtaaaggaactgaaaatcatgtccaccaacagcatgtaattaatatttatacagcggtccaccccaatacagcaggatacaaattctttttacatgcccacagaacatacacctagataggccataaaacaaacatcggcaaatttagaattggtatcatatagagtgtgctctccattcttaaaagaattaatccagaaaggataacaggaagataataggaaaatctccaaacacttggaaactaacagtacacttctaaataatccatggatcaaaaatgaagtttcaagataaaaataaaaatacatttaactgaatgaaaataaaaaatacaacatataacaattcataaggcatggttaaagcaatgcagagagggaaatttatactttacacattagtttttactttatctgtttacttatctctttgtctattagaaaagagtaaaagtttcaaaataataatcgaatctcccaccagaaactcaaagcaagcagaaacaagaaaataaagtaagaacagaaattagaaaataattaaatttaaaacagaaaaccagtagaagaaaatcaataaatcaaatacctgtttctttgaaaagaacaataaaattgacaaacaagatggacaagggaaaaaaagagagaagatacaaattactaatatcagaaatgaaacagaacatatcacaacctaccttgcagacatcaaaagaataagggaatgctatgaacagttttacacacataaaattgacagcttagacaaaatgaaccacttccttgaaaaacacaaacagctataactcacccaatatgaaacaggtaatttgagtagccctatgactataaagaaaattcaatttgtaacttagaaacacccaaaaaagaaatgccctagacaagatggttttactggagaattccaccaatgtataaagaagagttaacatcaattctatatagtatctttcagaaaatagaggagaacacttaataaattcaatttaggaaagtagaattatctggttactaaaactagataaatgcagtacaaaaatttaactacaaattaatatctcttatgaacataggcacacatttcttcaacaaaatatttgcaaataaaatgcgacaatatataagaagaattatatgtcatgaccaagtgaggtttatttgaaacatgtaacactgcttcagtattcaaagaccaattaaccatattaacaggctaaaaaaatcatattaccatatcaattgatgcagaaagagtgtttgacaaaatttaacacttgttcatgttaaaaagtctcagaaaaatagcaaagagtagagctccctccgcttcataaagtgcatatatgaaacacctatagctaacattattcttaatggtgaaaaactgaatgctttacccctaagactgggacaagacaaggctactggcttttactactctttttagcatattactggaaagtctagcagccagtgcaataaggcaagaaaaagaaataaaaggaactacaataaaggcaataaaagaatgaaataaaattttctgtatttttatatgattatctatgtggaaaatctcaaggaatctacaaaaactttgaaactaatacatgagttcagaaaggccatgggatacaaaatcaacaaacaaaaattaattatatttttatataattacagtggacacctgagcaaaaaaattaaaaatataatattatttgcaattgttaaaaataaaagattttagttaaaaatataccacaatatgtacaggacttgtatgatgaaaattacaagtgtgatgatgaaaaaaattatatgagatctacataaactgagagacataccatgctcatagtttaaaaaacaattatttccaaattgatacagaggtttaatataatttttatcaaaattttgacaagacctttttgtggatatagacccaattattctaaaatttatatggaaaggcaaaggaataaaatagtattgaaaaaaacaaataaaatgggagaaatccatttatccaatttgaagttctgaaatatagccacagtagtcaattctgggtcatagtggcagaggatagacacttagattaatggaatagaacagagaaccccaggaatagacccatacaagtatgctcactgaatttttgacaaaggcgcaatagcagttcaatagaaagaaggtagcctttcaacaaatgttgctaggacaatcgaacattcatgggcataaacatgtaccttaacatgtctcacccattatacaaaaaaaaagtcaaaatatatcatggacttaaattataaaatgtaaaatactgttaagacttttagaaaaaaagacaggagaaaattttgggggacctagaagtaggcaaaaggttctgagacttgacacaaaaagcattgttcataaataaaaaatgaataaattgcacctcatcaaagttaaaagctttttctctatgaaaattcctattaagaggataaaatgaaaaactacatagtgggtgaaaatatgtgcaaggcacataatctaataaagaactctcaagattcaacagtaaaagtaaataaataaacaaaataaatgtgtgtgtata

SEQ ID NO: 4645 - DNA, 308 bp, Homo sapiens
  source 1..308: mol_type = other DNA
ggctgggtgcgatggctcatgcctgtaatctcagaactttgggagggtgaggaggatggatcacctgaggtcaggagttcaagaccagcctgaccaacatggtaaaaacccatctctactaaaaatacaaaaagaattatctggatgtagtggtgggagcctacagacccagctactcaggaggttgaggtgggagaattgcttgaacccggaaggcagaggctgcagtgaaccaagatcatgccactgcactccagcctgggtgacagagcgggactctgtttcaaaaaaaaaaaaaaaaaaaaaga

SEQ ID NO: 4646 - DNA, 192 bp, Homo sapiens
  source 1..192: mol_type = other DNA
aagaacgtgaactctgaaatcaggctgcctgagttccaattccagttctgtcagttactagtcacatgacttcaggcaatttttttagccttcctgggtctcagtttcctcatctataaaatgaggataataacagagcttatctccgagggctattataaagattaagacattattaggtataaagcaatt

SEQ ID NO: 4647 - DNA, 284 bp, Homo sapiens
  source 1..284: mol_type = other DNA
ggcccggcatggtggctcatgcctgtaatcccaacactttgggaggccgaggcaggtggatcacctgaggtcaggagtccaagaccagcctggccaacatggtaaaaccccatctctactaaaaatacaaaaaattagccgggcgtggtggcatgtgcctgtaatcccagctactgaggaggctgaggcaggcgagtcatttgaatctgggaggtggagattgcagtgagtcgagatctcaccattgcactccagcctgggcaacaaaagtgaaactccatctc

SEQ ID NO: 4648 - DNA, 240 bp, Homo sapiens
  source 1..240: mol_type = other DNA
gggctgcagggggctatgaaaagacacaggatttgggttcaatcacaactagatttgaatcctggtcataccatgtactagttttttcaccctgggaaagtcacttgactttgtaagcctccatttcttcacctgtcaaataggtatattaatgccagattgattcaagtattatcaaaaatatgtgtgggaagtatttaacacagtgcctggcacatagcaagttccccagaaatggta

SEQ ID NO: 4649 - DNA, 176 bp, Homo sapiens
  source 1..176: mol_type = other DNA
aaattctaaatccaccttccttattgggtgattctggataaggcttttgatctccctgagacttagtttactcatgagtacaagaactttgtgaagaccaaaataaacagcagcaaatataaggcacctaacaaagtgcctctcccgttgcaaacattcactctaaatgctagccc

SEQ ID NO: 4650 - DNA, 293 bp, Homo sapiens
  source 1..293: mol_type = other DNA
ggtggctcaggcctgtgatctcagcactttcggaagccgaggcaggaggatcacttgaccccaggagttcgagaccagcctgggcaacatagtgaggccactgtctctaccaaaaaataaaaataaaaataaaaaaactagtggacgtggtagtgcaggtctgtagtcccagctacttgggaggctgaagtggaggatctcttgagcctggcagttggaggctagctacagtgagctatgatcgtgccactgcactccagcctgggtgacagagcaagaccctgactcaaaaa

SEQ ID NO: 4651 - DNA, 1752 bp, Homo sapiens
  source 1..1752: mol_type = other DNA
aaatcggtaccaaaaagtggggtggttactataacaaatacttgaaaatatggaagcagcttttgaactggctaatgggtagaggctgaaagaatttggaggagcaggctagaaaaagcctgtattgctgtaaagggagcattacgggtgatcctggtgagggctcagaagaaaagagggaaagcctcagtcttcttagagattacttaagcgttcccgaccagaatgctggtagcaatatgaacagtcaaggccactctgatgaggtctcaaatggaaatgaggagcaaggattggaaagtggagtaaagggcatccttgtcacacagtagcaaagaccttggctgaattgtgtccatgcctgaaggctttctagagtgtgcagcctgagggcaatgaactaggatatctggtggaagacagccaagcagcaaagcattcgggctactgtgtggctacttctgactgcatacaatgagattccagaggaaggaaatgacttaaagacaatttaaaattaaaagggaagcagaatggaataatctggaaaattcaaagcctggccatgtaaacagtgaaaaagcatattccaaacactaagggtggggccacgtggctgttaaagagattaccatggaaagaaagaaaccaggtgctattcatcaagaaaatgtgaggaagatccctgaaagcaaaagcgtttcagagatcttcaaggctgcccctcccatcacagacccagagctctaagagggcagaatggttttcggttacaggcctggggagccctccacgggctcactgaccagggctacctagggactctactcccacattctagcagagtgctccttggctgccttagctgtggctcaagtgggccttggtgtggcttgggctaccactctgggagggataagctataacccatggtggtgtccatgtggtgttaattctgcaggtatgcaaaacgcaagagctgtggaggccatggcttcctccacctagatttcaaaggatgcggcgaactgcctagaagtctaggcaaaaacctgccacaggggcagtgccactgcagagagccaatactagggcaatgccaaggagaaatgtggggttggagccaccagagaggagcagtggcagcagggtcatccccaacaccacagaactgtagggttgccagtgtgcaactcccgcctggaagaactgaagcactggctgaacccggcacagccacaggggtggagctgccaggcctgggggcccaactcctgccccaggccaggacacagaacataaagtcaaaggagattattctccagctttaagatgtaatgtttccctgttgggttctgtacttacttgggactgcttatcccttttttcttgcccatttctccctttcagatttgcaatgtctatcctatgcctgtcccattattgtattgtggaagtagacgacctgtgtgatttcacaggctcacagctggcatagttcttcttggctgtggctcaagtggaccttggtgtggcttgagctaccactctggaaggtataggccagaaactgcggtggtgtccaagtggggttaattcacctcaggacgaattgtgccttgactgtcactcatatctgatttagatgagactctgaactttggagttgatgctgggccaagtgaagacttttgggactactggcatgaaatgaatgtatttcgtatgtgagaagcgggggtcaggggtgga

SEQ ID NO: 4652 - DNA, 2060 bp, Homo sapiens
  source 1..2060: mol_type = other DNA
aaaaccagcacaagacaaggatgccctctctcaccactcctactcaacatagtattgaaagttctgaccagggcaatcaggcaagagaaagaaataaagcgtattcaaataggaagagaggaagtcaaattgtctctgtttgcagatgacatgattgtatatttagaaaaccccatcttttcagcccaaaatctccttaagcttataagcaacttcagcaaagtctcaggatacaaaatcaatatgcaaaaatcacaaacattcctataccccaatgacaggcaaacagagagccaaatcatgagtgaactcttattcacaattgctacaaagagaatacgtaggaatacaacttacaagggatgtgaaggacatcttcaaggagaactacaaaccactactcaaggaaataagggaggacacaaacaaatggaaaaacattccatgctcatggataggaataatcaatatcgtgaaaatggccatactgctcaaagtaatttatagattcaacgctattcccatcaagctaccattgactttcttcacagaattggaaaaagctactttaaacttcatatggaaccgcccgcatagagaagacaatcttaagcaaaaagaacaaagctagaggcatcatgctacctgacttcaaactatactacaaggctacagtaaccaaaacagcatggcactggtaccaaaacagatacatagaccaatggaagagaacagagacctaagaaataaaaccacacatctacaaccatctcatctttgacaaacctgacacaaacaagcaatggggaaaagattccctatttaataaatggtgttgggagaactggctagctatgcagaaaactgaaactggaccccttccttacaccttacacaaaaatcaactcaagatggattaaagacttaaagataagacctaaaaccataaaaatcctggaagaaatcctaggcaataccattcaggacataagcatgggcaaagacttcatgtctaaaataccaaaagcaatggcaacaaaagccagaattgacaaatggaatctaattaaactaaagagcttctgcacagcaaaagaaactgtcatcagagtgaacaggcaacctacagaatgggagaaaatttttgcaatctatccatctgacaaagggctaatatccagaatctacaaagaacttaaccaaatttacaagaaaaaaacaaccccatcgaaaagtgggcaaaggatatgaacagacacttatcaaacatatgctaacaaagatattaaaaaaaatgctcatcatcactggtcattagagaaatgcaaatcaaaaccaccatgagataccatctcacgccagttagaatggcgatcatgaaaaagtcaggaaacaacagatgctggagaggatgtggagaaataggaactgttctacactgttggtgggagtgtaaattaattagttcaaccattgttgaagacagtgtggcgattcctcaaggatctagaactagaaatatcatttgacccagcaatcccattactgggtatatacccaaaggatttataaatccttctactataaagtcacatgcacacatatgtttatcgggtcactattcacaacagaaagccttggaaccaattcagatgtccatcaatgatagactggataaagaaaatgtggcacatatacaccatggaatactacacagccataaaaaaggatgagttcatgtcctttgcagggacactgatgaagctggaaaccatcattctcagaaactatgacaagaacagaaaaccaaacgccacgtgttctcactcataagtgggagttgaacaatgagaacgcgtggacacagagaggggaacatcacacatggggcctgtcggggtgggggtctagaggtggaatagcattaggagaaattcctaaggtaggtgaccggttgatgagtgcagcaaaccaccatgacacatgtatacctatgtaacaaaactgcacattctgcacatgtaccccagaactttaagtataataatattaaaaaaaaa

SEQ ID NO: 4653 - DNA, 164 bp, Homo sapiens
  source 1..164: mol_type = other DNA
caaattgtaacctgcacaagggtactgggccaaggaggagaatggaaggaaagagcagggtctgaatccagcctgcatgctccttggcaagcagatcctctgctgtaggaattttgtgccaaggaaggaggctctttccctaatttccacaaaagcaccatttg

SEQ ID NO: 4654 - DNA, 235 bp, Homo sapiens
  source 1..235: mol_type = other DNA
atttgacccttgagcaacataggtttgaactgcaagggtccacttatgcatggactattttcaactataaacgagtcaaaaatatatcattaaccaaacacgaaacccacttatagagcaggttcatatactcaggttccaaagggccaactgcaggacttgagttctcacgtatggatttgggtatatgtggaagttcctggaaccaatcccctatgtaaaccaagggataact

SEQ ID NO: 4655 - DNA, 323 bp, Homo sapiens
  source 1..323: mol_type = other DNA
ggtatgggctgaactgtgtatcccccaattcatttgttgaggtcctaactcccatttcttttgaatgtgactgttcggagatgaggcctttaaagaggtgacttaagttcaaaggaggctgttagtctaatccaacatggtgtcctttggacataagagataccagcaatgtgtgcacagaacaaagaccaggagaggacacagtgagaaggcagttatctgcaagcaaagagagaggcttcagaagaaacaaaatcaccagcaccttgatctttgacttctaatctccagaatagtgagaaataaatttctgttgttaagcc

SEQ ID NO: 4656 - DNA, 83 bp, Homo sapiens
  source 1..83: mol_type = other DNA
actgtgggaggccgacgcaggaggattgcttgaggccaggagttcaaggccagcctggacaacatagtaagaccctatctcta

SEQ ID NO: 4657 - DNA, 85 bp, Homo sapiens
  source 1..85: mol_type = other DNA
cttgttaatgttggccttgggctagtcctttcccatctctgatcctctgcttcctaacttgtaaaatacagattaaatgctccta

SEQ ID NO: 4658 - DNA, 354 bp, Homo sapiens
  source 1..354: mol_type = other DNA
catgtaatcaaagtgaacttaaaaataggacagtttcaacaagtcaggagattcacagcaactgatcaaagggagtccagtcaacgtgagcaagcgtgattatgatgaggaagccccctctgctttaatccacacaaggaacgtaacctgaagtaacctgatgttaaccaatctgctgtgtctactatgctgtttccttgttcctgctagtgctgctttacaaatgcagaccattctatcatacctggcggggcttctgttttattttgtaggctggatgctacccagttcatgaatcgctaataaaagccaattagatctttacataatttgttgagattttattctttgaca

SEQ ID NO: 4659 - DNA, 52 bp, Homo sapiens
  source 1..52: mol_type = other DNA
aaagaagaataaccaggatgatgagagctgtggaagctgtatcgtccaagga

SEQ ID NO: 4660 - DNA, 6318 bp, Homo sapiens
  source 1..6318: mol_type = other DNA
acaagaaacagctgcagacagaggctcccactgagaagaatgaaaacagtgagtgaatcctgcactggtgactgaggtatccaggttctcctattgggacttactaggcaattggcatgacccatggagagtgaggaaaagcatggagagtgaggaaaagcacggagagtgaggaaaagcagggtggtgtgacggcccacctggaagccacacaaggcaaagggagctaccacctgcagccaagggaggcagtgagtgattgtgctaccctgcccaggaaaccacactttttccatggatctgtgcaacccacagatcaggagatccccttcgtgagcccacacaccagggccttggtgtgtagccacaaggctagagagagcctaccacagagctgtgcagattctcagcagccactaggctggagactgcctaaggctgctgagttcctgcgggaaggactggccaccatcactgtggcttcctgctgcctaagatgacttgagttcccggtaggaggagtggcagccatcactgcagctccagtctgccatttttcccctgccagtgctggggagactgggtagtttggacccaggaggaattgcccacagcacagcacagcagctataaaaggttataaccagactgtctctttaggccaggccctgatcaatcctcctcactgggtggggcctccctgcaggaacttcagcaattcctgccaggagtttagaaacagaactctgatctctctgagactgagctcttgtggggaggggtggctgtggtctccatggatcaacagacttagtcttttccccctgctggctctgaggaatccgggcagtctggacgagtgggattccacccagcatagcacacctcctctgccaaggggcagctagagtgatttgttaggtgggtcctggatcccatgcctcctgactggggagatctccccaacagaggtcaccagacaccgtatacaggagcattcctgctggccttagtttggtgcccctctgagacagaaatcccagaggaaggagcaggcagccatctttgctattttccagcctccactggtgatacctccaagtatgggagggacccccagcaaattgcagtagccctatgggagtggaacctgactgttaaaagaaaaacaaacagcaacagcaacaacagtatcaacaaaaaagtcccacaaaaaacatatccaaaggtcagcagcctcaaagatcaaagctagataaactcatgaaatgagaaagaatcaacaaaaaagtaaccccactgaaaactcaaaaagccagagtgcctcttctcctccaattgattgcaacacctctccaggaaggacacagaacttggcagaggctgaggatggatgaattgacagaagtaggcttcagaaggtgggtaataacaaacattgctgagctaaaggagcatgttctaatccaatggaaagaagctaagaatcatgataaaacattacagaagctattaaccagaaaaaccagtagagaggaacataaatgacctgatggagcggaaaaacacaacacaagaacctcacaatgaagccacaagtatcaataaccaaatagactggagaaaagaatttcagagcttgaagactatcttgctgaaataagacgggcagacaagattagagaaaaaagaatgaaaaggaattaacaaaacctctgagaactatgggattatgtataaaagactgaacctataactgattggggtacctgagagagaatggaaccaagttggaaaccatacttcaggatgtcatccaggagaacttccccaacctaacaagacaagccaacgttcttattcaggaagtccagagaaccccagtaagatattccatgagaagatcaaccccaaaacacataatcatcagattctccaaggtcgaaatgaaggaaaaaatgttaaagtcagccagaaagaaaggccaggtgacctacaaaggggagcccatcagaataacagcagacctctcagcagaaaccctacaagcttgaagaggaggccaatattcaacattcttaaaggaaagaacttccaacccagaattttacatacaaccaaactaagcttcgtaagcaaaggagaaataaaatcctcttcagacaagcaaatgctgagggaattcactgccaccaggcctcccttgcaagagctcctgaaggaagcactaaatatggaaaggaaaaattatttccagccactcctaaaacatgctgaagtataaagaccagtgacactatgaaacaactacatcaacaagtctgcaaaataaccagctagcacaatgatgacgggatcaaattcacacataacaatattaactttaaatgtaaatgggctaaatgcccccagttaaaagacacagaatggcaagctggataaagagtcaagacctatcagtgtgttgtattcaagagactcatctcatatgcaaagacacatataggctcaaaataaagggatggcagaaaatttaccaaacaaatggaaagcagaaaaaagcagaggttgcaatactagtttctgacaaaacagactttaaaccaacaaagatcaaaaaacacaaagaagggcattacataatggtaaaggattcaattcaacaagaagagctaactattctaaatatatatgcacccaataccggagcacccagactcataaaacaagttcttagagaccgacaaagagacttagattcccacacaataacagtgggagactttaacatgccgctttcaatattagatcatcaagacagaaaattaacaagaatattcaggacttgaactcacctctggatcaagcagacctgataattatctacagaactctccaccaaaaaacaacagaatgtacattcttctcggtgccgcaatgcactgactctaaaattgatcacataattggaagtaaaacactcttcagtaaatgcagaagaactgaaatcataaatcacactctctcagaccacagcacaatcaaattagaacacaagattaagaaactcactcaaaaccacacaactacatggaaattgaacaaccttctcctgaatgactcctgagtaaacaattaaggcagaaatcaaattgttttttgaaaccaaggagaacaaagagtcaacataccagaatctctgtgatgcagctaaagcaatgttaaaaggaaaatttatagcactaaatacccacatcagaaggctagaaagatctcaaatagacacccagcatcacaactaaaaaaatgagaaccaagagcaaacaaacccaaagctagcagaagacaagaaataaccaagatcagagtggatagagacacaaataacccttcaaaaaaatcaatgaatccaggagctggtttttgaaaaaactaataaaatagattgctaactagactaatgaagaaaagagagaagaatcaaatagacacaataaaaaatggtaaaggggatatcaccccgaccccacagaaatacaaccaaccatcagagactactataaacacttctatgcaaataagctagaaatatagaagaaatggatacattcctggacacatacaccctcccaagactgaaccaggaagttgaacccctgaatagaccaataacgagttctgaaattaggcaataataagctaccaacaacaacaaaaaaaaagcccaggaccagatggatttacagctgaattctaccacgggtacaaagagaagctggtaccatttcttctggatctattccaaacaattgaaaaggagggactcctcactaactcattttatgaggccagcatcatcctgatatgaaacctggcagagatacaacaaaaaaagaaaacttcagggcaatgtccctgatgaacatcgatgcaaaaattttcaataaaatactggcaaactgaatccaggagcacatcaaaatgcttatccactaatatcaaatcagctttatccctgggatgcaaggttgattcaacatatgcaagtcaataaatgtaattcatcacataaacagaactaaagacaaaaaccacatgattatctcaatagatgcagaaaaggactttgataaaattcaacatcccttcatgttaaaaactctcaataaactaggttttgatggaacatatctcaaaatagtaagagccacatgacaaacccacagccaatatcagactgaataggcaaaacctggaatctttccccttgaaaaccagcacaagacaaggatgtcctctatcaccacttctattcaacatggtattggaagttctggccagggcaatcagtcaagagaaagaaataaagggtattcaaataggaagagaggaaatcaaactgtctctgtttgcagatgacatgaccctatatctagaaaactccattgtctcagcccaaaagcttcttaagctgataagcaaattcagcaatgtctcagcatacaaaatcaatatgcaaaaatcacaagcattcctatatgccaacaataggcaagcagaaagccaaatcataaactcccattcacaaatgctacaaagagaataaaatacctaggaatacagataacaagggaagtgaaggacctcttcaaggagactacaaaccactgctcaagtaaataagagaggacacaaacaaatggaaatacattccatgatcatggatgggaagaatcaatatcgtgaaaatggccatgctgctcaaagtaatttatggattcaatgctattcccattaaactaccattgacattcttcacagaattagaaaaaactactttaatgttcatatggaaccaaaaaaagcccaaatagccaagacaatcctatgcaaaaagaacaaagctggaggcatcacactacccaactccaaactatactatgaggctacagtaaccaaacgagcacagtactggtccaaaaacgacacatagaccaatggaacagaatagagatctcagaaataagaccacacatctggaaccatctgaccttcaacaaacctgaaaaaacaagcaattgggaaaggagttcctatttaataagtggtgctgggagaactggctagccatatgcagaaaattgaaactggaccccttccctacaccttatacaaaaatgaactcaaaatggattaaagactttaaaacccaaaactataaatatcctagaagaaaatataggcaatatcattcaggacataggcacaggcaagatttcatgatgaaaatgccaaaagctattgcaacaaaagcaaaaattgacaaatgggatctaattaaactaaagagcttctgtacagcaaaagaaactatcatcagagtgaacagaaaatctacagaatgagggaaaacttttgcaacctatccatttgacaaaggtctaatatccagagtctacaaggaacctaaacaaatttacaagaacaaataatcccattaaaaaataggcaaaggacatgaacagacacttctcaaaagaagacatttatgtggtgaacaaacatgaaaaaaaaaccaacatcactaatcattagagaaatgcaaatcaaaaccacgagatgccatctcatgccagtcagtattaaaaaggcaagaaacaacagatgctgtggagagataggaacagtttcacgctgttggtaggaatataaattagttcaatcattgtggaagacagtgtggtgattcctcaaagacctcagaccagaaatatcatttgactcagcaatcccattactgagtatatacccaaaggaatataaatcattctattatgaagatacatgcacacgtatgtttattgcagcactattcacaatagcaaagacatggaatcaacccaaatgccaatcaacgatagactggataaagaaaatggaatgatagactggataaagaaaacggaatattatgcagccataaaaaggaaacagatcgtgtcctttgcagggctgtggatggagctggaagccattatcctcagcaaactaacacaggaacagaaaactaaacactgtgtgttctcacttataagtgggagctgaacaatgagaacacatggacacagggagaggaacaatacacactggggcctgttgggggtgcagcaggaggagaggatcaggatcaatagctaatacatgtgagacttaatacctaggtgatgggttgatagatgcagcaaactaccatggcacatgtttacttatgtaacaaacctgcatgtcctgcacatgtatcctagaacttaaaattaa

SEQ ID NO: 4661 - DNA, 244 bp, Homo sapiens
  source 1..244: mol_type = other DNA
agtagtcctgccttatccacagttccacttcccatggtttcagttatccatgggaaactgtggtcaaaaatattatatggaaaattccagaaataaacaattcataacttttaaatggtgtggttttctgagtactgtgatgaaatcttgtgtgatctgctctgtcctgcctgggctgtgaatcatttctttgtctggtgtatctacactctatgtactacccacccatttgtcatttagtagc

SEQ ID NO: 4662 - DNA, 79 bp, Homo sapiens
  source 1..79: mol_type = other DNA
agggtttggtacatcagtgatttcaggccttctctgtgggtcttgaaatgtatcccccatgaataagtggggactactg

SEQ ID NO: 4663 - DNA, 819 bp, Homo sapiens
  source 1..819: mol_type = other DNA
tattgtgatatcatacaaaacatatctggtctttgtttccaattcttgtcacagagctttgaaagccctccagatttcctgagtgataggaatatcttttgttgttcataatacacctttttaaaaaatcatacttgagtttatgtggatgaggtgaaatagggtagggcccctagatagcctcaatagtggatctgatcactaaaaagaccaagcaactagagggttataactttcaactccacccaactaacctctgggaaggaaggtatggggatggagattaagctctatacaaattcttaaacagtgatatttgatgaccttctagattggtctacacatcaaggtgctggaagtgtcgcatgcccagagatgatgtggaagctctatacccctttcccttctgcccaccttgccctgtgcatctcttcctgaatggcttctcctgaattgtatcctttataataaactggtaaatgtaagtaaagtgttttcctgagttctgtgagccattctagcaaattattgaaccagagaaagaggggttataggaaccctcaacttgtagccagttggtcagaagtatgggaggaccagcttgtgattatcatctgaagtggaggcagtcttgtgggactgagccctttaacttgagggatatgatgcttactccaggtaggtagtgttggaattagagtaaattgtaggatatctagttggtgtccagagagttggagaattggtcagaatggaaacaaccccacacatttgcacacagaagtgtgttaagtatgagttatagagaagaataggctg

SEQ ID NO: 4664 - DNA, 350 bp, Homo sapiens
  source 1..350: mol_type = other DNA
gtgaaaggaaaataaaatcttgggaccccaatttaactctgccaataggaaaaaaaataaactgaaagccgagtcatgggagaaactgcctctccttttgtccctaagcagatgctacagataaaaggccagatatctccacagatagttattctatcttcactttatcttatgtaaagtgccgatttactgagtgtgagatgaatacaaaattgaccattctcttttttgtcattctgcttttttcttttttttatcttgcaacatgtggattcagtaatgtgaccatatccctccagcccacttttcccctttaaatactaaagctctcaacattatctctgaaaaaa

SEQ ID NO: 4665 - DNA, 248 bp, Homo sapiens
  source 1..248: mol_type = other DNA
acagtgtcagctgcatggaatggttcagagacctaagcctggagccagcctgacctggctttgagtaatgactccctcccttgctggctcagttactttgggcctctatatcctcatgtgtaaaatagggatagtaattctggctggtttcatcttcagtgttattttgatttttccattatattatgggtggaaaggagctgtgtaaactgaacaaggctgaacacatgacaagaattattattgtt

SEQ ID NO: 4666 - DNA, 313 bp, Homo sapiens
  source 1..313: mol_type = other DNA
ggccaggtgcggtgactcacgcctgtaatcccagcactttgggaggccaaggaaggtggatcacctgaggtcaggtgttcaagaccagcctagccaacatggtgaaaaaacccatctctactgaaaatacaaaagttagctgggcttggtggtgcacacctgcaatcccagctacttgggaggctgaggcaggatcattgcttgaacccgggaggcagaggttgcagtgagccgagatcgtgccactgcactccagcatgggcgacagagtgacagtctgtctcaaaaaaaagaaaagaaaaaagcaaagaaa

SEQ ID NO: 4667 - DNA, 124 bp, Homo sapiens
  source 1..124: mol_type = other DNA
aagccaggctctggaggccggtggtcccgggttctaccatggcttctctgcctggtgcctctgtgccctgggaaaattcatttcccttctccaaacttcactttcttcagctgccaaagggtga

SEQ ID NO: 4668 - DNA, 193 bp, Homo sapiens
  source 1..193: mol_type = other DNA
gcacagtgaagcaggaaggaactcagagtggacaatgtgggctccccagttgccctgccacatcctggctctcagaccagtcatttcatccctcaaggctcaggtgcctctctgtgaaatgagctgaggatagcttccctccaccctcgccagggctgctggcatgggcacaattgagtagtaagtgcaaaag

SEQ ID NO: 4669 - DNA, 206 bp, Homo sapiens
  source 1..206: mol_type = other DNA
ggagcctgaaagagcttcattgtccaaataccactgagaggctgggtgaccttgggcaggtcccttcacttctgtgaacctcagtttctccatctgtccagagggaaaagtggtacccacccacagggatgttttgaggattagcagagataacaaatgtgaaactcccagcacagcatctggcatgcagtgagaattcagtaaat

SEQ ID NO: 4670 - DNA, 140 bp, Homo sapiens
  source 1..140: mol_type = other DNA
ctttactccaaatctagctctatgatcatagaaaaatcatttcaccattctggtcctcagagtcttcatgcacaaacagaagaggttgagctacatcatctctcaggtcccttttatctctcctggtgattttgtggttc

SEQ ID NO: 4671 - DNA, 299 bp, Homo sapiens
  source 1..299: mol_type = other DNA
ggcccagagtgatggctcacacctgtaatcccagcatttcaggaggctgagacaggaggatcacttgagtccaggagtttgagaccagcctaggcaacatagtaagaccctacctgtgcaaaaaaaaaaaaaaaaaaaaatcaaaaacttagccaggtgtggtgcctcatgcccgtagtaccagctactctgcaggctgaggcaggaagatctcttgagcccaggaggttaaggctgtggtgagctgtgttcgtgccactgcattcccacctggacgacagagcaagactctgtctcaa

SEQ ID NO: 4672 - DNA, 207 bp, Homo sapiens
  source 1..207: mol_type = other DNA
caggagctttggatgcaggcaggctggcgctctgatcctgactctttcaattacagactgtgttaccttggacaatttggctaagtccttatgcaaaaaaagtatgatgccatttacttaatagggttgtgaggattaaatgagataattcatataaagcccatagcggaaggcctggcaggtagcaagggcccagcaaatgagagc

SEQ ID NO: 4673 - DNA, 275 bp, Homo sapiens
  source 1..275: mol_type = other DNA
gtgtttcccaaagtctttctagagattactagctccacagaatgttcaaaggtcctactcggtgaggaaattccacgttcaaataagtttggaaagactgagttaaacaaagttaaagaggatctttaactgcacggcttttcagaacaccctaacgtgcatcatctccaagaagtacttatccaggcagtattttccaaacttatttgacaaaggatactttttaaggaagaggatcaaacaggaatagttcactgtgagcacactttgggaaa

SEQ ID NO: 4674 - DNA, 208 bp, Homo sapiens
  source 1..208: mol_type = other DNA
gtataaagaactacatggcctttggagtcaaacctgactaaaatcttcgctctatctcttcttacaagcttgtaactttagctaagtcaatcaacttctttgaaactcagtttgctcacgtgtgaaattagaataatacctacctcatgggctattaagagaattgcacaagataacactatctggcacccaataagttcttactgaa

SEQ ID NO: 4675 - DNA, 205 bp, Homo sapiens
  source 1..205: mol_type = other DNA
tggaaagaacatagaacttggagtcggaagacctgattgtatctcagcttaggcacctagcagatgtatgacctaggataagtcattaacctctctggtttttttagatgtgatcggggttggaaggcaggtagcaatatctaccttactgtatcattttgaagactaactaggataacaatgtgaagccttgtcagttggcaag

SEQ ID NO: 4676 - DNA, 237 bp, Homo sapiens
  source 1..237: mol_type = other DNA
ggcagcatggtgtcctggaagagtgaggattttgagatcaagcttttgtggtttctaaacctctcccacagctttttagctacataattttagcaagttcttaacttgtttgaaccctaatttccttatgcatggagagaggataccacaggcacttctgggagccttgtctcatagattaaatagagttggtgaaatttaactgcctagcatccagtaggaattttatacatgcta

SEQ ID NO: 4677 - DNA, 98 bp, Homo sapiens
  source 1..98: mol_type = other DNA
tggaaagaacgtagaacttggagtcggaagacctggttgtatatctcagcttaggcacctagcagatgtatgacctaggataagtcattaacttctct

SEQ ID NO: 4678 - DNA, 53 bp, Homo sapiens
  source 1..53: mol_type = other DNA
taacctgtgtctgtcaatggatgaatggataaagaaaatgtggtgtatagata

SEQ ID NO: 4679 - DNA, 377 bp, Homo sapiens
  source 1..377: mol_type = other DNA
tatatatataatggaatactttatagccttaaaaaagaggaaaattctgtcattttcaacaacacggatgaacccagaagacattgtacagagtgaaataatcgaggcacagaaagacaaatactgcgtgatctcatttgtgtaatctaagaaagctgaacacatagaagcacagagaagactggtggttaccggtgactggggttggggagatgaagaaaggggagatgttggtcaaggagtacaaagttcagttagacagaaggaataagttttagtgatctactgcacagcatggtgactggccatagttaataataacatattgaatacttcaaaattcctaaaagagtagattttaaatgttctcacagcac

SEQ ID NO: 4680 - DNA, 120 bp, Homo sapiens
  source 1..120: mol_type = other DNA
gtgaggtgattgatatgttaattaggttgattcaatcaatccacaatgtatatgtatatcaaaacaacacactattctccataaatatatacaattactatttgtcaattaaaaataaga

SEQ ID NO: 4681 - DNA, 290 bp, Homo sapiens
  source 1..290: mol_type = other DNA
agcattttctaaaacatgttcaatggaacaccagctccttgagatgttcaaaggatattcctcagatagggtatacattgatcaataagtttatgaaatttgggccaaacaaaattaaacaggtttactgacagaaccagcctgtcagagcctttaaaatgcaaacccaccttgtgaatctctatggtaagacataatattcggtgtttaccatgcatacttaatcataaagctgtcttttcttggaacatcttacagggcttgtgtccccagtacaaactttagaaaat

SEQ ID NO: 4682 - DNA, 240 bp, Homo sapiens
  source 1..240: mol_type = other DNA
caatggttacaagtgcagaatttggaggcaagtagtccttgattagaatcccaatactagcatttgctagctgcataatcttgggcatgtcactcagcttctctctgagccaccctctctttacctttaaatggagttgatggtactgtttcatgggattgcgtgatgattaaatggtaatatttatcaacttcttagtatcatacctgatacatggcgagtgcccaataagtgtcagct

SEQ ID NO: 4683 - DNA, 194 bp, Homo sapiens
  source 1..194: mol_type = other DNA
tttcaaactgtgttccacatagatctggggcttttctagaagaactgtgttgagaacatgggtggaggtatccccctcttacttccaggcacaccaagaacagctgttcacttatctgtcaaatagtagggttccttggaagatttcatttgcaaaaggagttgtactgctaaaaacaaaagtttgcggactac

SEQ ID NO: 4684 - DNA, 169 bp, Homo sapiens
  source 1..169: mol_type = other DNA
cttgggtatatttctttacatccctgagcctcctttttgtatctttaaatcagcaatgaaccctacttcaggaaactgtcgtgagcaataaataagttaatgaatgtcagtgcttagtaaagcgcccatcacgtagtaaatactgaatagcaaatagctaaatttatca

SEQ ID NO: 4685 - DNA, 295 bp, Homo sapiens
  source 1..295: mol_type = other DNA
ggcacgctggctcatgcctgtaatcccagcactttgggaggccaaggtgagaagatggcttgagcccgggagtttgagaccaggctgggcaaaatggtgaaactccatctctacaaaaaatacaaaaaacttagctgagtgtggtggctcacacctgtggttccagctactgtagaggctgaggcaggagaatcacttgagtctaggagttcgaggctgcagtgagccatggtcacaccattgcattctagcctgggcaaaagaatgagaccctgactcaaaaaaaaaaaaaaaa

SEQ ID NO: 4686 - DNA, 57 bp, Homo sapiens
  source 1..57: mol_type = other DNA
tgaatgacacccttgggagttgtacagagctcaacctgcaggactaaacacacagct

SEQ ID NO: 4687 - DNA, 300 bp, Homo sapiens
  source 1..300: mol_type = other DNA
gccgggcatggtggctcgagcctgtaatcccagcgctttgggaggccaaggtgggtggatcatttgaggtcaggggttcgagaccagcctggccaacatggtgaaaccctgtctctactaaaaatacaaaaattagccaggcgtgttggtgggcacctgtaatcccagctactcaggaggctgaggcaggagaatcgcttgaacacagaaggtggaggttgcagtgagctgagatggcgccattgcactccagtctgggggatagagtgagactctgtctcaaaacaaacaaacaaaaaa

SEQ ID NO: 4688 - DNA, 267 bp, Homo sapiens
  source 1..267: mol_type = other DNA
ttgagaggccaaggtgggcagatcatatgaggtcagcagttcaagaccagcctggacaacatggcgaaaccccgtgtctacaaaaaatacagaaattagctgggtgtggtggcgtgagcctgtaatcccagctacttgggaggctgagttaggagaatcgcttgagccctggaggttgaggttgcagtgagccaagattgagtcattgcactctagcctgggtgacagaacgagactccatctcaaaaaaaaaaaaaaaaaaaaaaa

SEQ ID NO: 4689 - DNA, 504 bp, Homo sapiens
  source 1..504: mol_type = other DNA
ccaaagacccagccatgggttacagggccctacagaatctggcacggccagcccatcctctgacctcagtcctgccactcattcccttgctcacttcaccatggcctcttgggccttcacactgttccttaagctttctgagcctgctcccaccctcgggctttggagtgtgctgctcccactccctggataccactcttttcccagcacttcacagagcgtgctccctcatttcactcagcagctcagatatgacccagaacagagggcttctctgactaccagcctaaaaaggcacccccatcctgatctaccccttcaagctgctctaggtttccttgtgaaacttatctgccttgatattatgcaagtattggtttactataatatctatggcctgcctccccatcagtgagcagaatataaggactgattccatcatccactgctgaatcccagtgccctgaaggcagacaagtatgtggtatgagcttcatgagtgtt

SEQ ID NO: 4690 - DNA, 300 bp, Homo sapiens
  source 1..300: mol_type = other DNA
gcctgggcttctacttctttagctattccatttaacacatctatgtttgcctcttatgtctctgtccaaaagcgtcttcccattgtaagcctttcctgattctctgaagttagatccagtgtctcctgagcactggctgcaccctctgtaccctcgatcgtagtgagcagaatgttatctcagtgtctgtttgttcgctacacagtgagttccttggaattaaatacccgtcttctttgctctagtaaccccagaacttagcacagagcatggtgatagtattttattgactgagtgaat

SEQ ID NO: 4691 - DNA, 186 bp, Homo sapiens
  source 1..186: mol_type = other DNA
gagaggtgttgtcatgtaaagggggaaaaggatgggctttggattcaatcagttctgagtttgaattccatctttaccattcaccatcaccttggaaaaatctatttctttaagctccagatccaacagctgaaaaatgggtttatagtattctccttgtggggtcgtcataagactcaagacata

SEQ ID NO: 4692 - DNA, 281 bp, Homo sapiens
  source 1..281: mol_type = other DNA
ctgtgcacggtggctcacgcctgtaatcctagcactttaggaggccgaggcgggtggatcacttgaggtcaggagttggaaaccagcctggccaacatgctgaaaccccatctctactaaaatacaaaaaaattagccagatgtggtggtgggagcctgtaatcccagctacttgggagactaaggcaggagaatcacttgaacctgggaggcagagattgcagtgaactgagatcgttccactgcactccagcctgggtgacagaaaaaaaaaaaaaaaa

SEQ ID NO: 4693 - DNA, 314 bp, Homo sapiens
  source 1..314: mol_type = other DNA
gccaggcacggtggctcatgcctgtaatcctagcactttgggaagttgaggcaagtggattgcctgagctcaggagttcgggaccagcctggggaacatggtgaaactccaactctactaaaaaaaaaaaaaaaatacaaaaaatcagccaggcatggcagtgtgcacctgaaatcccagctacttgggaggctgaggcaggaggatcacttgaacctgggaggcggaagttgcagagagtcaagatcatgccattgcactccagcctggacaacagagtgagactctgtctcaaaaataaataaataaataaa

SEQ ID NO: 4694 - DNA, 261 bp, Homo sapiens
  source 1..261: mol_type = other DNA
aagcagttgcgtgtgggggaaagagtctggtctttggtgtaaaataaacctgtgttcgaatccagttctatcactttagcagctgctccctatggccattccctttctcctctgaacctcaatttccccgcctcctctccctggagatacatatgtctatctcatagtgttgcaggagagtgggatgaaatgagaagacatatgttaagctactggcacagtgcctggcacacattaaggtgtgcttaatatgtggtagct

SEQ ID NO: 4695 - DNA, 100 bp, Homo sapiens
  source 1..100: mol_type = other DNA
ccatgttagtatttatcattcttcacaacaagtatctgtttacatgtctgctttctatacctgactgtgagctcattaagggcaagacctatccatcatt

SEQ ID NO: 4696 - DNA, 213 bp, Homo sapiens
  source 1..213: mol_type = other DNA
gatcgagaccatggtgaaaccccgtctctactaaaaatacaaaaaattagctgggtgtggtggcgggcacctgtagtcccagctactcaggaggctgaggcaggagactggcgtgaacctgggaggcggagcttgcagttagccgagatcacaccactgcactccagcctgggcaacacagtgagactctgtctcaaaaaaaaaaaaaaaaaa

SEQ ID NO: 4697 - DNA, 207 bp, Homo sapiens
  source 1..207: mol_type = other DNA
gtggcaggcagactctaaggtggccccattgatactgcctcccggcattctcatacgtgtgcaattacctccccttgagtgtgggatggcccagtgactttcttctaacaaacagaatatgactaaggtgatggaatatcccttccatgattaggttacacaggattgtgatgtgcctcttgcttatagactttctctctctctctc

SEQ ID NO: 4698 - DNA, 309 bp, Homo sapiens
  source 1..309: mol_type = other DNA
ccgggcatggtcgctcacacctcttaatcccagcactttgggagcccgaggcgggtggatcacttgaggttaggagttcgagaccagcctggccaatatgctgaaaccccgtatctactaaaaatacaaaaaaattagcctggcatggtggtgggcacctgtaatcccagctactcaggaagctgaagcaggagaatcacttgaacttgggagtcgtaggttgcagtgagccaagatcgagccattccactccagcctgtgcaacaagagcgagattccatctcaaaaaaaaaaaaaaaaaaaaaaaaa

SEQ ID NO: 4699 - DNA, 354 bp, Homo sapiens
  source 1..354: mol_type = other DNA
aactctctttctcattggctttgttaatgtaaatggccttgttggagaagcccatgtggcaaggaactgagggtagccttggaccaacagctttgaaggaactgaggccctcagttcaatatctctcaagaaatggagtccagccaacaaccacatcaacaagcttggaagctaatcatcccccaattcagcctttagatgagacatcaaccctgtccaacacagacaataacctcatgagagaccatgaggcagaaaatccaactaagctgtgcttagacctctagaaaccatgagataataaatgagtgttgatttaaagtaatttggtatgcagtaatagataatgaatac

SEQ ID NO: 4700 - DNA, 107 bp, Homo sapiens
  source 1..107: mol_type = other DNA
agtcagaagacctaggattccaacctgaccctgttgccaactggcggaagatcttagaaagatctttcccttctctatgtctcagtttcaccctctttaaaatgagg

SEQ ID NO: 4701 - DNA, 144 bp, Homo sapiens
  source 1..144: mol_type = other DNA
ttgggggctgctgtggagagacagggaggccaagcaggggattcccctcaaccttatttcaatgaaagcccctccacttatctattttgtacactgagcctcctcatgaaattttatttgatgaaagggctctgtgcagaaaaa

SEQ ID NO: 4702 - DNA, 1985 bp, Homo sapiens
  source 1..1985: mol_type = other DNA
aacaagcagagggtctaggagatgaccactaccactgcagggctctcctcttgctttagtttgctaactgactcttgctggctagaatttttttttttttttttttttttttgtcactgctggcaagctcatgctttgtgctgtgctgctttgtactgcgttcactgagccttaccaagcttctgttatagatgtgctcagctaagttggaatttttgataattggcatttaagaacaagaataaagtggcatttaagaacaagattaaagtggccctgggtcatgtgtcttggtcgagacttacctgtgtctctgaattgtgtttctggatcccagtgtcagctgtgactgtcacgaggctcagaggaatgactcttaccctgtgacttttggttgtttatctcaaccaggtgttgccctcattgtatggcgtactcaaaagaaacagtcataccctatgcaatatgcaggctggttggtagtcactcatggacgaagaccatgttgaatgctatggtgcacactcccaaaagcagatggtttactaggactttacaaaatgcctttcttcctacttctgcctatgccctatgccactatgccccctgaccaaaaaaaaaaaaaaaaaaaaaaaaaaattcctgatcctaagggttatagggaaaagcatccatgctatagccaaggagttctttcaaagccaacttaagcactgggtcctcaaaccctataaagcaactgttggcacgggagagaacctaatcctgattatatgtatttgcaactctggaggaagaatcttacacatatgagcaggatcgagaggaccttccctcctccccaacccctccccacaccaccaccaaatgatatacggtagccaccaaaaggaaaataaaataaacttggatactgggggaaagaaacaaaaaactaaaacagaggttcacaatttgacccaattggaaatccaaaattaaagaatttttgcaacaacaacaaaacaagataaaaggttactatttggcttttgtacctctacaacctaggttccgaattaacttttaacatttgctgaaatgcaccagttgtcaacccttcatagccttaatattgggcttcaaattatacctggaattcccctaaatttaaacaaagtacccctataatcttagggtagttaactgaggatattttaggacatgttaggaagacaaatagatatgcctcatcttaatcagaactattgccctgcctaaattcccccatagccatagcacccattaacttaaaatatcccatagtgggcatggatgctctaacccaatgagtaataaattaaaattgaattaagtctttggcacttacaaatcagcttgccaaaatgggacggcatggaccttcccctcctccgttagttaaaatagttaatatggcccaatttaaattaaaacagagtctttgaggtttgaaacccatataccagacctatttggagaagagtgactatccccactgcttcaccattaatggcccaatgtagcctgttcagaaacctagaaagaatgaatggcatctcacagtagattattgccatgttaatgctgaagttctatccaataaggctcccatatcaaatattatcaaaattactaactttaatcaacaactggtaaatacttttaattcatagatttggctaatattttagcagcgactcagccacaatttgccttcaccatcaaagggatgcagtatccttttactcagctactcatgggataacaacagccaggtcttcacacagcctgcagacaagatcttgaccacatttaactttcttcaggagcacagtaaacactgatcatactgatcacatcatcctccaagaaggttcatttggcacactcactgaggacacatatagtcataatcataaaagagctcacgaaaaagggatggaccactaccccacacaaattac

SEQ ID NO: 4703 - DNA, 2035 bp, Homo sapiens
  source 1..2035: mol_type = other DNA
tttaaaaaataataataataaaaaaaagaaaactccatcatctcagccccaaaacttcttgaactgataagcaatgtcagcaaagtctcaggatacaaagtcaatgtgcaaaaatcacaagcattcctttacatgaataggcaagcagaaagccaaatcatgaatgaactcccattcaaaaagaataaaactcccatgcaaagagaataaaatacctaggaatacagctaagaagggatgtgaaggacctctttaaggagaactacaaaccactgctcaaggaaataagagaggacacaaacaaatggaaaaacatttcatcctcagagataggaagaatcaatatcatgaaaatggccatactgccaaaagtaatttatagcttcaatgctattcccatcgaactaccattgacattcttcacagaattagaaaaaaaaaactactttaaatttcacatgagtcaaagaagaacccatgtagccaagacaatcctaagcaaaaagaacaaagctggagacattacaatacctgacttcaaactatgctacttccaagcctacagcaaccaaaacagcgtggtactgataccaaaacagacatatagaccaatggaacagaacagagacttcagaaataacaccacacatctacaaccatctgatctttgacaaaactgacaaaaaaaggaatggggaaagaatcttctctgcagtaaatggtgctggctagccatatgcagaaaagtgaaactggaccccttccttacaccttatacaaaaattaaatcaagatggaaacaagacttaaatgtaaaacccaaaaccataaaaactctagaagaaaacctagacagtaccattcaggatataggcatgggcaaaggcttcatgacgaagatgccaaaagcaattgcaacaaaagccaaaattgacaaatggtatctaattaaactaaagagcttctgcacagcaaaagaaactatcattagaatgaacaggcaacctacagaatgggagaaaatgtttgtaatctacccatctgacaaaagtataatatccagaatttacaaggaagttaaacatatttacaagaaaaaaacaaccctgtcaaaaaatgggcaaaggatatgaacagacacttctcaaaagacatttatgcagccaacaaacatatgaaaaacagcccaacatcactgatcatcagagaaatgcaaatcaaaaccacaatgagataccatctaatgccagtcagaatggcaattattaaaaagtcaggaaacaatagttgctgatgagatatggagaaataggaatgcttttacactgctggtgggaatgtaagttagtttaaccattgtggaagacaggatggcaattcctcaaggatctacaaccagaaataccatttgacccagcaatctcattactgggtatatacccaaaggaatataaatcattctataaagatacatgcacatgtatgtttattgcagcactatttgtaatagcaaggctgtggaaccaacccaaatgcccatcaatgatacactggataaagaaaatgtggtaatgggtgcagcaaaccaccatggcacatatatacctatgtaacaaacctgcacattctgcacttgtatcccagaacttaaagtataataaaaaaggaaaagaaaatgtggtacatatacaccatggaatactatgcagccataaaaaggaatgagatcatgtcttttgcagggacatggatgaagctggaagccatcaccctcagcacacttacataggaagagaaaaccaaaccccacatgttctcactcataagtgggagttgaacattgagaatgcatgaacacagagagaggactaactcacaccagggcctgttggagggttgggggtgaggggagggaacttagaggaccactcaataggtacagcaaaccaccaaggcacatgtatacctatgtgacaaacctgcacattctgtgtatgtaccccccttttgtttagaagaaataaaggaaaaaaaa

SEQ ID NO: 4704 - DNA, 293 bp, Homo sapiens
  source 1..293: mol_type = other DNA
ctggtcgcagtggccgtacctgtaatcccagcgctttgggaggccgcggcgggaggatcgcttgagcccgggagttcgagaccagcctgggcaacatagtgagaaacccgtctctaccaaaaagaaaaaaaaaaaaaaaggaaaaaaattagtgcggtgtggtggcacgcacctgtagtcccagctactcgggaggctgaagcgggagggtcccctaagtctaggaggtcgaggcttcagtgagcggtgattgtgccactgcactccagcctgggcgacagagcaagaccctg

SEQ ID NO: 4705 - DNA, 341 bp, Homo sapiens
  source 1..341: mol_type = other DNA
ggccaggcatgatggctcatgcctgtaatcccaatactttgggaggttgcgcattttgggagactaaggtgggcagatcacctgagcccaggtgtttgagatcagcctgagcaacaaaggcaaaagcccatctctttcttaaaaaaaaaaaaaaaaaaaaaatacaaaaacttagccaggtgtggtggtgcgcatctgtggtcccagctactcaggaggctgagacaggaggatcacttgggcccgggaggcagaggctgcagtgagctgagatcgttccactgtactccagcctatgtaatagagcaagactctgtcttggaaaaaaaaaaaaaaaaaaa

SEQ ID NO: 4706 - DNA, 109 bp, Homo sapiens
  source 1..109: mol_type = other DNA
tgagacaaaaaagggtagacttgaataaatggaaagacatcccatgttcctggataagatgactcaacatcataaagatgtcaattttccccaataaaaacatcagcag

SEQ ID NO: 4707 - DNA, 301 bp, Homo sapiens
  source 1..301: mol_type = other DNA
ggccgggcgcggtggctcacacctgtcatcccacacctataatcccaacattttgggaggccggggcaggtggatcacgaggtcggtcaggagttcaagaccagcctggccaagatggtgaagccccgtctctactaaaagcaggcacctgtaatcccagctactccagaggctgaggcagggaattgcttgaacctgggaggcggaggttgcagtgagccgagatctcgccactgcactccagcctgggtgacagaactagactccatctcaaaaaaaaaaaaaaaaaaaaaaaaaaaca

SEQ ID NO: 4708 - DNA, 310 bp, Homo sapiens
  source 1..310: mol_type = other DNA
gccgggcacggtggctcacacctgtaatcccagcacttcgggaggccaaggtggatggatcacctgagtctggagttcaagaccaacctgggcaacatggtgaaaccctgtctctactaaaaatataaaaattagctgggcgtggtggtgttcacctgtaatctcagctacttgggaggccaaggcatgagaatcgcttcaacctgggaggcagaggttgcagtgagccgagattgcaccattgcactccagcctgggcaacagagtgagaccccatctcaaaaaaaaaaaaaaaagaaaaagaaaagaa

SEQ ID NO: 4709 - DNA, 197 bp, Homo sapiens
  source 1..197: mol_type = other DNA
aaattctggttctgcaacttcctagcgtgactttgggcttgggcaagtttcttagccgttctgagccttcatttcctcatctgtacaatgagattaatagtacctatcatctaccttcaggattgctgacagacagaatttgaaataaaatatgcaagttagctaatacaaaaagtagatgatccaaaaatggtagc

SEQ ID NO: 4710 - DNA, 218 bp, Homo sapiens
  source 1..218: mol_type = other DNA
caggggatagttagtaaactgcagtcagtgggccagatctggcccactgcctgttgctaatagagttttattggaacacagttatacccattttttaatgtatttgtgtgtggctgttttgtgctagcgtgacagagttgagtaggtgtggtagagacttttggccacaaagcctaaaatatttactacctggcccttttaaagataagttactaacc

SEQ ID NO: 4711 - DNA, 268 bp, Homo sapiens
  source 1..268: mol_type = other DNA
tgtaatcctagcactttgggaggccaaggcgggtggatcacaaggtcaagagatagagaccatctttgccaacatggtgaaactccatctctactgaaaatacaaaaattagctgggcgtggtagtgcaagctgaaggctgaggcaggagaatcactcgaacccgggaggcagaggttgcagtgagccgagatcacaccactgtactccagcccggcactccagcctggcgacaagagtgagactccacctcaaaaaaaaaaaaaaga

SEQ ID NO: 4712 - DNA, 81 bp, Homo sapiens
  source 1..81: mol_type = other DNA
gttgcgccgccccggccaagcctcagcctttctgggccttagcttcttcacgtgtaggtggggagggaggactggaccacc

SEQ ID NO: 4713 - DNA, 71 bp, Homo sapiens
  source 1..71: mol_type = other DNA
gaggtgggaggccggcatccaggtcttggctctgccctgagaccttggacaaacccttccccctctctggg

SEQ ID NO: 4714 - DNA, 100 bp, Homo sapiens
  source 1..100: mol_type = other DNA
tttgctaggctgtgaggtgccttagggcaggtctcttgtgccctgttctcttgtccccaccaccaacctatagcaggcaccaaagcaagtgcccggtaaa

SEQ ID NO: 4715 - DNA, 158 bp, Homo sapiens
  source 1..158: mol_type = other DNA
gcaatcttgggccagatccttctcccctagcctcagctatctcatctataaaatgcggtaccactggcatcttcctcatagagttgttctggagagttcaagagatgaggcaggcaatgaagccagcgccgtgcctagagcctatatagtagttgctc

SEQ ID NO: 4716 - DNA, 146 bp, Homo sapiens
  source 1..146: mol_type = other DNA
ggtgagtggtaggtggggatgggagtgggcgggaggggaccctgggtgtcagccccagtgccacctgctctggctcagtctgggccttcggacaggtcacactccctttatgcctcagtttcctcatctgtaaaatgaggggggcg

SEQ ID NO: 4717 - DNA, 553 bp, Homo sapiens
  source 1..553: mol_type = other DNA
aaagcatataatacccagtgttgctgtgggcatggtgagaccggcagtgtcatacgtggctggtggcattgcaaactggtccagtcctttaggaaagcaattcggcaatacttatcaagagccataaaacatccatcccccctgactcagtgagaaaacaatctcaaacaacatattcatcccagggttacttaaaacagcaaaaaaaaaaaaaaaacccaaaacaaaacaaaacaaaaaattaaaaaaagcaaaagaaagaaaaaagcaaaaaaaaaaaaaggaaagagccaaacagctaagaaggtttagataaacaaaggcatagccctctggtgcaatattaaacagctattaaaaataatcttaacacagatgatcaaatcctatggtaaacgatcatgccattctattcagtgacaaagaaacagggtacagcctgggacttatatcaatcacaatcatcagatacaaatccccaagtctgtgcctagaaaaaaaatgggatgaaagagacaaaaatgctgactggtggttttcttcaggtggtgag

SEQ ID NO: 4718 - DNA, 170 bp, Homo sapiens
  source 1..170: mol_type = other DNA
ccaggcgtggtggcgggcacttgtaatcccagctactcccaaggctgaggcaggagaattgcttgagcccaggagtttaaggttgtagtgcgctagacggcgcctgtgaatagccactgcactctagtctggggaacatatgagacccctgccatctcaaaaaaaaaaaa

SEQ ID NO: 4719 - DNA, 70 bp, Homo sapiens
  source 1..70: mol_type = other DNA
ggtgggatccaggaatctgcattttcataaacgttccgagtggttacgagctgcaaccaggtttgggtac

SEQ ID NO: 4720 - DNA, 120 bp, Homo sapiens
  source 1..120: mol_type = other DNA
ctactagaaagtcaactccgaggtcgaggaccatgtctgcctcgttccactgcatctgcagccttctggatagtgcctggcacatagtaaatgctcaataaatgtttgctggatgtgtga

SEQ ID NO: 4721 - DNA, 315 bp, Homo sapiens
  source 1..315: mol_type = other DNA
gctgggccgggtggctcatgcctgtaatcccagcactttgggaggccaaggtgggtggatcacaaggtcaggagttcgagaccagcctggccaacatggtgaaatcctgtctctattaaaaatacaaaaattagctgggcatggtggcgcgtgcatgtaatcccagctactcaggaggctgaggcaggagaattgcttgaaccggaacctgggaggcggaggttgcagtgagccgagatcatgccactgtactctagcctgggcgacaaagcaagactccatctcaaaaaaaaaaaaaaaaaaaaaaaaaaaaaa

SEQ ID NO: 4722 - DNA, 294 bp, Homo sapiens
  source 1..294: mol_type = other DNA
ggctgggcatggtggctcacgtctgtaatcccagcactctgggaagctgaggtgggcagatcacctgaggttgggagttcgagaccagcctggacaacatggtgaaaccccatctctactaaaaatacaaaaattagctgggtgtggtgccacatgcgtggaattccagctactcaggaagctgagatgggagaatcgcttgaacctgggaggtggaggttgcagtgagccaagatcacaccactgcactccagcctggttgacagagtgagactccgtctcaaaaaaaaagaa

SEQ ID NO: 4723 - DNA, 205 bp, Homo sapiens
  source 1..205: mol_type = other DNA
aacccaaagccacctcttccaggcagccttccctgatctgtcctctaacttctgtcaacctgcaggaccacgccctcactgtgagacttctgtagcctgcctggctcctccttgaggctggaactctctccagggtggttaactctttccctctgttttccttatgcccaacactgggtcaggcagagtgggcgacaataaacgc

SEQ ID NO: 4724 - DNA, 70 bp, Homo sapiens
  source 1..70: mol_type = other DNA
gtgagctccttgtccttgcctcagtttaccatctgtaaaatgggcagactgctcataccaagcccttcct

SEQ ID NO: 4725 - DNA, 414 bp, Homo sapiens
  source 1..414: mol_type = other DNA
tgtcagaggcgttcgaaccagagcgactccattttgagtgagggctggaaaacgaggctgggacccgctgggctgcattaccagaaaggtgggtattccgagcccctagaggtttatggttaagggaacaaattaataatgtttactaaaacagacccggacttaggagtgtccagatatcgccatatctgaagaacaaaggcattcctaattttgctttaaagataataatatcgattcttgcaaaatatagtaattaagaaaattaatcctttatcacaaacccttgtagcagagcaaatctccccatatatacaagcattgtacctagggtggatgcgttcctcgctcctcctcttactttcaggaacatcctactctgtctacggagtagctgtctttttaccgctatcc

SEQ ID NO: 4726 - DNA, 140 bp, Homo sapiens
  source 1..140: mol_type = other DNA
tggcttaatgtgtctttaggtagatgacctctgagccacagtttcctattctatgaattggggtttagtaaatctctcgggactgagagccaatgaggccatgtgtgcacacaaaatgctgggcacaaatgaggggctca

SEQ ID NO: 4727 - DNA, 307 bp, Homo sapiens
  source 1..307: mol_type = other DNA
gctgggcgcggtggctcacgcctgtaatcccagcactttgggaggccgaggcgggcagatcacgaggtcaggagattgagaccatcctggctaacaggtgaaaccccgtctctacttaaaatacaaaaaaaaaaaaaattagccaggcgtgatggcgggcgcctgtagtcccagctactcaggaggctgaggcaggagaatggggtgagcccgggaggcagagcttgcagtgaggtgagattgcgccactgcactccagcctaggtgacagagcgagactctgtctcaaaataaaactaaaataaaa

SEQ ID NO: 4728 - DNA, 314 bp, Homo sapiens
  source 1..314: mol_type = other DNA
ggccgggcgtggtggctcctgcctgtaatcccagcactttgggaggccgaggtgggcggatcacctgaggtcgggagtttgagaccagcctgaccaacatggagaaacccagtctctactgaaaatacagaaaagttagccaggcgtggtggcacatgcctgtaatcccagctgctcaggaggctgaggcaggagaattgcttgaacccaagaggcggaggttgtggtgagccgagattgcacctttgtactccagcctgggcaacgagcaaaaaactctgtctcaaaaaaaaaaaaaaaaaaaaaaaagaaaa

SEQ ID NO: 4729 - DNA, 299 bp, Homo sapiens
  source 1..299: mol_type = other DNA
gccaggcacggtggctcacgcctataatcccagcacttagggaggccaaggcgggcagatcacctgaggtcaatagttcgagaccagcctggccaacaaggtgaaaccccatctctactaaaaatacaaaaaattagccaggtgtggtggtgtgcacctgtagtcccagctatttgggaggctgaggtgggagaatcacttgaacctgggaggcggaggttgcagtgagctgaaatcgcgtaccacactccagcctgggtgacagagcgagactgtgtttcaaagaaaaaaaaaaacaa

SEQ ID NO: 4730 - DNA, 165 bp, Homo sapiens
  source 1..165: mol_type = other DNA
gaacatctgggccccagtccagggcacctccctctggagataagcctgaccttgggcaaggcacttaatccctgtggggcaccagtctcctcacctgtgaaatgagaagtctggcccagctaccctccagggtgcattagggttctaaaatcctgcgagtccata

SEQ ID NO: 4731 - DNA, 137 bp, Homo sapiens
  source 1..137: mol_type = other DNA
cctaacatttatctcattgtcattgtctgggtctcactttcctattggactctaagttccatgaatctgtccatttcattattggattcttaactgttggcctacagcaagtgcttaataaatatgttcagtgaata

SEQ ID NO: 4732 - DNA, 344 bp, Homo sapiens
  source 1..344: mol_type = other DNA
actattcaccaaatattcgggtttctctccccgtggtgccctcccccgtaagagattatgtgtccccttttggctgaatttaggaatagtcatgggaggaagtgacatgtaagtagttctgtgcagaagctttgagattagtgcttgattcaccatttctcttttctctcaatatcccatcaatatcccacgtcaaggctcctcaatcgaactgggtgtgctagtgaagatgatgatggagtagatcctgcgttgacctgtgagagacctatagcataaataaggaataacatttgtcgttaatgagtgagattttgtagtcctttgtttctacaatataatct

SEQ ID NO: 4733 - DNA, 203 bp, Homo sapiens
  source 1..203: mol_type = other DNA
gcaaaccactgggtcatgaaattaggtttgtaggccacaaccagccttgtgttatgaaacagaaaacagaaaacatgaggacatgtaacatgtaaaaaaggaaagtacttgttcacaaaacttttgagttatgtgtgtgagtgtgtaagaaccagatcagactggaaaaaactctctcccactgtgggttcactgtcaacaaa

SEQ ID NO: 4734 - DNA, 265 bp, Homo sapiens
  source 1..265: mol_type = other DNA
ggcttggtgcggtgacccatgcctgtaatcccagcactctgggaggcttgagcccaggactataagaccagaccagcctgggcaacatagggaaaccctgtctctatatacagtagttcgcctggagccacagctacctgggaggctgagtttgggaggatcacctgagcccaggagatagagcctacagtgagctgtgattgtgccactgtattccagcctgggtaacagagtgagaccccgtctcaaaaaagcaaaatacaaa

SEQ ID NO: 4735 - DNA, 288 bp, Homo sapiens
  source 1..288: mol_type = other DNA
ttttgctctgcccctacatgccaagtgctacagaggcagacccccatacagagaggctgtggtggtgtcacgtggcctacggggctgatgcgaacgtctaattctggggttcagcgctgggaacttccctgtacatcctcagtatgtaacttgcatgtgatcctcatatatcaactgtagggtaataaaggtttcatgtgacctgtcatcatcttacccttctgatttgtttttcacctggtcaggtggaaacttgggtggagagaaggataagccatttattaaccc

SEQ ID NO: 4736 - DNA, 305 bp, Homo sapiens
  source 1..305: mol_type = other DNA
gccgggcacggtggctccctcctgtaatcccagtactttgggaggctgaggcaggtggattgcttgaggtcaggagttccagatcagcctgggcaacatagtgaaactccatctgtacaaaaaaaaaaaaaaaaaaaaaatagctgggcatcatggcacatgcttgtaatcccaattactcaggaggctgaggcaggagaatcgcttgaacccaggtggcagaggttacagtgatctgagattgtgccactgtactccggcctgggtgacagagcaagactgcctcaaaaaataaaaaaacaaaa

SEQ ID NO: 4737 - DNA, 242 bp, Homo sapiens
  source 1..242: mol_type = other DNA
agtttagtgggtagaaatacagatcctagaatgacattgctcgaattcaaatcctgccttctacaatttaatagcaatacgagttgggcaagacacttaacttcctcgcttcagtttcctcatctgtaaaatcaggataataatggtctttctcatagatttgttatgaggattaaaagttttaaggtaggtcaagcatgtagaacagtacctggcaaataatacacattatataagtgcta

SEQ ID NO: 4738 - DNA, 308 bp, Homo sapiens
  source 1..308: mol_type = other DNA
ctgggcccagtggttcacgcctgtaatcccagcactttgggaggctgaggcgagtggatcacctgaggtcaggagtttgagaccagcctggccaacatggcaaaacccggtctctactacaaaatacaaaaattagctgggcgtggtggcctgggcctgtaatcccagctacttgagaggctgaggcaagagaatttgcttgaacctgggaggtggaggttgcagtgagccgagatcgcaccactatactccagcctgggcgacagagtgagactccatcttaaaaaaaaaaaaaaaaaaaaaaaaga

SEQ ID NO: 4739 - DNA, 2037 bp, Homo sapiens
  source 1..2037: mol_type = other DNA
tcttatatcaagaaaaacctaaaggctctaccaaaaaactcttcaatctgataattaaattcggtaaagtcacaggatacaaaatcagcatacaaaaatcagtaaatcagtagcgtttctatacaccaataatgaactgagaaagaaagaaaaaacacaatcccatttacaatagctccaacaacaacactctaagaataaatttaaccaaggaggtgaaagatctctataaggaaaactgcaaagcactgatgaaagaaattaaaggaagagacaaacaaaggaaagctatcccatgataatggatcagaagaattattgttaaatgaccacactgcccaaagcaatctacagatttgatataatcagcatcaaaataccaacatcatttttcatacaattagagaaaacaatcctaaaatttgtaagtcaaaaaagggcccgaatagtcaaaaaaatcctaagcaaaaaggacaatgctggaggcatcacattacctgacttcaaagtatattatgaggctacagtaaccaaaatagcatagtatctgtataaaagcagacacatagacacacagaccaagggaacagaatagaggatccagaaataaattcatatatttacagccaactgatttttgacaaaggcatcaagaacatacattgggggaaaaaaacagtcttttgaatacatgagaagtgctgggaaaattggatatccatatgcataagaatgaagacggaaactggaccccatttctcaccatatacagaaaccaactcaagatgtattaaagacttaaacataaaacctacaactgtgaaactaccagaggaaaacttaggaaaaatatttcaggacttggtctagatgaaaattttatggctaagacctcaaaaaatgcagacaacaaatacagacaaatgggactctattaaattaaaaagctgtatagtaaacaatcaacacattgaagagacaacctgtagaatgagacaaaacacttgaactttttgcttgacaagggacactacccagaatatacaaggaactcaacaattaaaaaaaaaaggtaccattaaaaagtgggcataggacatgaatatgcatatctcaaaagaagatatgcaaatagccaacaggtatatgaaaagtaccatcattaatcaacagggaaatgcaagtcaaaaccacaataacatatcatcttagaacggcttttattaaaaggacaaaaagtaacagatgctggcaaacatgcagagaaaagggaactcttgtacactgttggtgggaatgtaaattagcctaatcactaaggaaaagaatactgagaattcttaaaaaactaaaaatagaactaccataagatccagcagttcactattgggtatttatccaaaggaaaaaaaacaatcagtatatcaaagggatgcctgcacttgcacgtttatcacagcactattcacaagagcaaggataggaaatcaacctaagtgtctatcaacagatgaatgaattttaaaaatctggtatatatacacaatggaataatactatgagccataaaaagaatgaaattctgtcatttgcagcaacatggatggaactggaggtcattatgttaaatgaaacaaaccaggcacagaaagacaaatatcatattttctcactcatatgggagagccaaaaaagctgatctcatggaggtcaagaattgaatgagagatacaagaggctggaaagggtgcatgggtggagcgggggacgaagagagtgtggttaatggttataaacacacagaagaaataagttataatgctcagtagcacagtagggtgactacagtcagcagcaatgtatattttaaagtaactagcacagaggacttgaaatgttcctaatatatagaaatgataaatactcaaggtgatggagaccccaaatactctgatttgatcattatatattatatgcatgtaacagatactcatatgtaccccataaatacgtaagatactgtgtatcaataaaaaa

SEQ ID NO: 4740 - DNA, 127 bp, Homo sapiens
  source 1..127: mol_type = other DNA
attaataattctatctttagcaaaaaactctggacagagaatgaatagggaaggcatggattgggagaaagaatatgtgtgtctgacaaaggatttaaagtcagaatatataaagtactacaactca

SEQ ID NO: 4741 - DNA, 291 bp, Homo sapiens
  source 1..291: mol_type = other DNA
gccgggcgcggtggctcacgcctgtgatcccaaaattttgggaggcttaggcgggtggatcgcctgaggttaggagtttgagaccagcctggccaacatggtgaaaccccgtctctactaaaaatacaaaaattagccaggcatggtgccaggtgcctgcaatcccagctactcaggaggctgtggcaggagaatcacttgaatccgggaggcggaggctgcagtgagctgagattgcgccactgtattccagcctgggcaacaagagcgagattttgtctcaaaaaataa

SEQ ID NO: 4742 - DNA, 136 bp, Homo sapiens
  source 1..136: mol_type = other DNA
aagaaacttcaatttaaaaacaatttcagcatcgttgaagtgccaatcagttttcaaattatgtgtgtgtatacatatgtatgtatgtgtgcatgcatgtatgtttgtattatgtgtattttttcctcctctctcc

SEQ ID NO: 4743 - DNA, 83 bp, Homo sapiens
  source 1..83: mol_type = other DNA
ttgagctttggttctgccatttgctagcagtgtgactcaagagaagccagtaacccccctgagcttccctagttcacaaaatg

SEQ ID NO: 4744 - DNA, 311 bp, Homo sapiens
  source 1..311: mol_type = other DNA
gccaggcccagtggcttatgcctgtaatcccagcactttgggaggccatagcaggcagatcacctgaggtcaggagttcgagaccagcctggccaacatggtgaaatcccgtctctactacaaaaaataaaaaattagctgggcatggtggggcgtgcctgtagtcccagcaactcaggaggctgaggcaggagaatcgcttgcatcctggaagaggttgcagtgagctgagattgtgccactgcactccagcctgtccgacagagtgaggcctcatctcaaaaaaaataaaataaataaataaataaata

SEQ ID NO: 4745 - DNA, 626 bp, Homo sapiens
  source 1..626: mol_type = other DNA
gcagacaacacctgatcagtcctaatatcagaaaagagacaagtagacattatgtgcttcctgaggtgaggcagtagtaaggaaacaacatcacacatgtagcagtcttgggaaaaaaaatgtaacctgtatctcgtaatgaggaaacaatcagtaaaaaagtctagattgtgggacattccacaaacttgcctgaactctttaataatgtcagtgtcatgaaagacacaccacacacacacacactgcacatcatacacaaacaccaccccaccacccaccactcagacacacacaaaagggcaactctaatcaattaaaggaaacaaaagagaatgacaactacatataacgtataattcttgattggatcctggatttaaaaataaacagctataaaggatattttggggacaactggagaattttgaatatggatcatatattagatttatgcagtatcagtgttcagtttcatgggcgtgaaaatattgcagatttataggacaatgctcttattaaaagaaagaatatgatgaagtattttacattttcatgatgtctgcaacttattttcagaaggttcaagaataagaatgtgtatttacagtgagaaagaaaatgtg

SEQ ID NO: 4746 - DNA, 134 bp, Homo sapiens
  source 1..134: mol_type = other DNA
aggtgcggtggtacatgccatagtcctggctactcaggaggctaaggttgaagctcacttgaggcaaggggttcaaggccagcttgggtaaaatagggagagaccccttctcttaaaaaaaaaaaaggaagaaa

SEQ ID NO: 4747 - DNA, 288 bp, Homo sapiens
  source 1..288: mol_type = other DNA
ggccaggcgcagtggctcatgcctgtaatcccagcactttgggaggccgaggcgggcagatcacgaagtcaggagatcgagaccatcatggctaacacagtgaaaccccgtccctactaaaaatacaaaaaaattagccgggcgtggtggcgggctcctgtagtcccagctactgcggaggctgaggcacgagattggtgtgaacccagaaggcggagcttgcagtaagccgagatagtgccactgagcctgggcgacagagcaagactccgtctcaaaaaaaaaaaa

SEQ ID NO: 4748 - DNA, 485 bp, Homo sapiens
  source 1..485: mol_type = other DNA
atgcgggaaatttctatttgcctctcaaaatctactttccatttttcttcatcttgttctgtgcccaggaagattgatccgaatggaccacattaacctcccctcttgttctctggcttccacctgggtttgaccaataacaggcactggcaggagatggaaggatgggaagaaagagcggttaccagggtacttattcactgcaacctctgcttgctgcctgttagagcggaacctgctttccttttctaatgttaccacagtcctgagggaaagagtggatttcctaatgccataactttcacctctcaccccttcattcctagggatggttagaattcccactattgctagccctgggatgctttactattcctctttgtttttttcaactctgttcatacctttggaaataaactcttcttaaactctgtttatccccaccgttggatgcacgatttgttgcctgttcagaccctgaatga

SEQ ID NO: 4749 - DNA, 297 bp, Homo sapiens
  source 1..297: mol_type = other DNA
gctgggcgcagtggctcatgcctgtaatcccagcactttgggaggccagggcaggcggatcacctgaggtcaggagttcaagaccagcctggccaacatggcaaaacccccgctctactaaaaatacaaaaattagccaggcatgctggcatgcgcctgtagtcccagctacttgggaggctaaggcaggagaatcgcttgaacctgggaagtggaagttgcagttagctgagatggcaccactgcactccagcctgggcaacagagcaagactccatctcagaaaaataaaataaa

SEQ ID NO: 4750 - DNA, 119 bp, Homo sapiens
  source 1..119: mol_type = other DNA
gctgggcgtggtggcttatgcttgtaatcccaacacttagggagtcaggagaatcacttgagctcaggagttctagaccaatctgggcaacagagagaccccatctcttttaaataaaa

SEQ ID NO: 4751 - DNA, 83 bp, Homo sapiens
  source 1..83: mol_type = other DNA
ctcctccttgggccctgggagctcctggggagtaagacttgagtctcccccatctctgcaaccccactgcaggtacatagtag

SEQ ID NO: 4752 - DNA, 711 bp, Homo sapiens
  source 1..711: mol_type = other DNA
agtgatgtcttgatgatcctgagcctatgtaggcctaggttaatgtgtatgtttgtgtcttaatttttaacaaaaaaaagttttaaaaggaaaaaactaaatatacaaaaagattacggaataaggatataaagaaaatattttagtacagctgtacagtgtatttgtgtttaagctgtgttatcacaagagtcagagttaaaaaattaaaaagtttataaagtagaaaggttacagtaagccaatgttaatttattactaaagaatgaaaatttatttttataaatttaatgtaggctaattatacagtgtttataaagtctatagtagtgtacagtaatgtcttaggccttcactcactcgttgactcacccagacctgacttctagtcctataggttccatttctgttaagtgcctaatacaaatataccattttttatctcttatgccatatttttactgtaccttttctatgtttagatatgtaagtacttaacactgtgtttcaattgcctataatattcagcacagtaacatactgaacaggtttgtagcctaggagcaataggctatagcatatagcctaggtgtataataggctgtaccatctaggtttgtgtaagaacactctgtgatgtttacaacatgatgaaattgcctaatgatgcatttcttaaaacatatccctgttgttaagcaatgcatgact

SEQ ID NO: 4753 - DNA, 403 bp, Homo sapiens
  source 1..403: mol_type = other DNA
atcttcccgcctacttttccagcataatttcctgttatttctcctgtattctagacatactaagatctttcaaagtcctttaaaaatgcaatgcatttgtacttgctgttctcacttctctgcatgccctgatttctggcctggtgaatgaagttttatctttccaggatcagtttaaatattgtttcctttggtgaaatcttctttgacattccagtcacatttagatgtacctccttttacatgtacaccactctattcatactggtattatttatttgtaggtttgtttcctgcaaaaacatctcctcaaagacagttactcatccctgtatctccactgcccaagcccgatgcctgatatatgagaacagttcaataaatattgattgactgaatggat

SEQ ID NO: 4754 - DNA, 264 bp, Homo sapiens
  source 1..264: mol_type = other DNA
gccaggcacattggctcatgcctgtaatctcagtgctttgggaggccaaggcaggagaactgcttgacactaggagttcaagtccagcttgggcaacatacggagacaccaggtctataaaataataaaaataatagctgggcctggtgacacatgcttgctagtcccaactactacggaagctgaggcaggaagattgcttgagctcaagagtttggcactgcagtgaactatgattgtgccactgcactccagcctgggcaa

SEQ ID NO: 4755 - DNA, 302 bp, Homo sapiens
  source 1..302: mol_type = other DNA
gccaggcgcagtggctcatgcctgtaatcccagcactctgggaggctgaggcgggtggatcatgaggtcaagagatcgagaccatcctggccaacatggtgaaaccccgtctctactacagaaattagctgggtgtggtggtatgcacctgtaatcccagctacttgggaggctaaggcaggagaatagcttgaacccgggaggcagcagttgctgtgaaccgagatcgcaccactgcgctccagcctggcaacagggcgagactccatctcaaaaaaaaaaaaaaaaaaaaaaaaaaaaaa

SEQ ID NO: 4756 - DNA, 412 bp, Homo sapiens
  source 1..412: mol_type = other DNA
caaaatctaatccccttcctcccttgctgataaccctcagctggtttacaaggcctcctctcacattttgtgccgcagaacagagaaggaattgtaggcccctgaagaccccaagctgtctctcctcggaggcctttgctctaggggctggtccctgtgggctggcatgccccttctgcgagctcttaaagacactgctcaggtgtcaccgcctctggaatgcccaccctggggctcccagcttgaactgcctcctctccgcttcagtcctggtaaaggcgggccttaacaatcgttgagtcccagaaggcttcacttccgggctcgtctgcttcaccagccagtgagctcgggcgagcccgtccattctgggtctcactatccccacacctatccgtatgtagagtggcgc

SEQ ID NO: 4757 - DNA, 2063 bp, Homo sapiens
  source 1..2063: mol_type = other DNA
agaatggtggagtgagggcctcagtgaatttgtgctgcctatacaacaacaaaaatatgggtaaaataatgaaaatcagccattttagaattctggcaattaagcaggagtatgaattgaaaatcatctgtccaagagaaaactagtgaatcttgggaagaccagtggggtctgcgatattttaacttggggttattctcatctctctctccagcttagtggtgtagctaaaagctggcagtattgcagacaatggagagagctgaccacttctggagccccattgaaggcactatccccagagcacagttaatattttgtcccaacttgcagctccctgggaaaactcttttcagagagagtggctggatatttgatttgactctgaactcagctcagttgggggaagaaaaagcttacccccagggcattactgaaacaatagcaaactgttggcaaaatgtcaattgcctaaggctgtgatttcagttgaggcaaaggaagaatctggccaggaatttaaaaggaaagtctggagaactagccaactatagggaactttggaaagctctggcatattcctgggtatttaaaaggctgtacaatgtgcaagtctgtacacatgcccggaaatgacctgggaaaggagaatgtcacctctgactgatcttgaggcactgtgtaagcaggaagtgaaaatcagtgctatttgtaagcttcctgaagtttgaaggtatgacttctcatgaagatttctttggcaaaaggtagaagacatataggcaaagcatttaaggaaatcttttaaatgatcattggttgactactacattttactggtccaggtatgacttcttggaagccaggcttacaaataaaaacaagatcctaaaaaaaaaaaaaaaaaaagttctagcagagaactcggtggccacacactacggggaatacaggatctgtaaaattcgttcatgaaagtactaaagaatcagcatcaagaaaaacaacacactgatgattaaaaaatttaggggaataatgtggagcaatctgatatgagatttgttaaaatatattacctaaaatgttcagttttaacaaaaattgagaaatgcaaagaaacaggaaataaaacacacagagacaaataataaaaaacgaacaaaaaaagtccctgtgggagcctagattttagactttgtagtctttaagttagctattacaaatacattcaaagaactaaatgaaaccatgtctaaagaattaaagggaagcatcagaatggtgtttcaccagagaaagagtatcaataaagatagaaattattaaaaaacaaggaagttctggagcttaaaagtataataactgaaatgaaaaattcactagaggagctcaacaacagatataaattggcaaatgaaggaatcttttaactcgaagttaggtcaatagagattgttcaatgtgaggatcagaaagaaaaatgaacagagtctcaaaagacttatgtgactccattaaatgttgtgccaacatggacattataggattcccagaagatgagaatgaggcagaaagaatatttaaaaaaaaatggcagaaaactttccaaacttgctgaaaaatattactctgtgctacacatccaagaagctcactgtaatccaagttgaataagcccaaagtgatccatacctagacccatcatagttgaatttaaagaaaaatcttgaaagtagcaggagaaaaatgacttgttacaaggaatcctcaataggcttaatagctgacttacgagaaaccctggaggctagaagacattttcaacattgaaagtaaaagactgtcaaccagtaattctctatttagctaaacttttcttcaaaactgaaagtgaaattaagacgtttccaaatagataaaaactgaaaggattctcacgaactctaagaaatgttaaagggagtctttcaggttgaaatgaaaggacacttaatggtaaattttaatccgtgtgaagaaataaagaggaatggttaaaggtaactacaggcattatgaaa

SEQ ID NO: 4758 - DNA, 450 bp, Homo sapiens
  source 1..450: mol_type = other DNA
tggcattcatgctcgtgtgaagtcactttcctttcagtttgggttgggcctgtagcttgttttaacaaagagaatgcaaagggattaaagctcttccaggtctgggtgcaaaaaggcccgacaacttatgcttttgtgttttcgagagagaggatcatcatgtaagaatctgaccgttctcctagagagacccagtggaaaagaggccacatggagagggagaatttctgagattacatggagagagatgcttagccatgctagtatcctagctgatctcatttctcacctgctggctgaaagcagtagtatgaatgaccaccagcaagatgactgtaagaactgcctagttgagccctgctcagattgcagaattatgaccaaataaaatggtggttgttgtgccagtaagttttggggtggtttgttacacaacaaaagaaaagcaaa

SEQ ID NO: 4759 - DNA, 637 bp, Homo sapiens
  source 1..637: mol_type = other DNA
ctcagcaagtcaaactcattgccttaactcaagccctcacccttgcaaagggactacgtgtcaatatttatactgactctaaatatgccttccatatcctgcaccaccatactgttatatgggctgaaagaggtttcctcactacgcaagggtcctccatcattaatgcctctttaataaaaactcttctcaaggccactttacttccaaaggaagctggattcattcactgcaagggccatcaaaaggcgtcagatcccatcgctcagggcaacacttatgctgataaggtagctaaaaaagcagctagcattccaacttctgtccctcatggccagtttttctccttctcatcggtcactcccacctactcccccactgaaacttccacctatcaatctcttcccacacaaggcaaatggttcttagaccaaggaaaatatctccttccagcctcacaggcccattctattctgtcatcatttcatagcctcttccatgtaggttacaagccgctagcccacctcttagaacctctcatttcctttccatcatgaaaatctatcctcaaggaaatcacttctcagtgttccgtctgctattctactcctcctcagggattgttcaggccccctcc

SEQ ID NO: 4760 - DNA, 109 bp, Homo sapiens
  source 1..109: mol_type = other DNA
cagtggttcaaggttacaataagctgtgatcgtgccactgcattctacctgggatgacagagtgggaccctgtgccacagagtgagaccctgtctcaaaaaaaaaaaaa

SEQ ID NO: 4761 - DNA, 1327 bp, Homo sapiens
  source 1..1327: mol_type = other DNA
ttggaccaatccccttgctgaggacaaccaaaaagattggatgaagtataaaaagcacttacttgaaagcatcaaagacgtccaagatagtgaggaagtttaaagtcaagatctaggaaaagacaagaaactagagaaagaaacccagccgtaaaatcactttttttcccccctgcgggcttctgccaagtctggggaagcagctgcaaagctaaactatattttttgatgattcctcagagccggacaaacagaagtcagaaactaaaacctgccaggaatagggattcaggagtagggatttaataactcaagcccccttcgagctgagaatctgaaaggccacactctcaatatgaggagtagctgctaggaaaccagccctggcacagaattgtagtcagttttgcatcatttaacagtacaagtaaacttcaactctgacattatattaagatatttctggaatgataacacacactgctatttgcagcagcaaatgaatatcctctcaagagaaagacatcatcataacaggcctcagcacttcctccatatgacttataaaatataatttccatcatacaatgaaaaataagggtttacaaggcaacaagatcactgaatgagtaacagaagacagagaagctacaaaaaaagcctccaaaacatgaattattgaaatgatcagatatggttcacaaaataacgatgctttttacatttatgaaataaattccaagcttaaaaacatccgtgaaaaggaaactctaaaatttaatgtgacatattaagaaaaaaatccaaaaatataatactcaaaattaagatgggcttaagagcaaatgaaatgtagctaacatttttaaatggaagacaagaagaaaacatcctccagaatgcagcacacagaaataaaagggaagaattggaaaagagtggataagaggcataagtggtcagtgacaagttgtagcccagaaagtgtgaagggaatgggacagatataaaattggaagaaataacagctctgaatttttcaaaagtaaaaacgatatcaatctacaactttaagaatctccatatatcctaagcaaaataaattataagaaactcacacccagacattgcagcaaaacttcagacaacaatagacagagacaaaaatcttaaagcatcagaaaagaagcagttactttcaaaggaagaacagttagactgagaactgacttctcaatagtaacaaaggaagccagcgagcaatggaagggttttcaattaacactgaagtttgataaggcaaaaaacaaaaacaaaaacaaaaaaa

SEQ ID NO: 4762 - DNA, 129 bp, Homo sapiens
  source 1..129: mol_type = other DNA
cacacctgtagtcccagctacactgaaagctaaggcgggaggaccacatgagcccaggagttccagactagccttgctctatttaaagagcaagactccactgccaaaaaaaaaaaagaaaaacaaaga

SEQ ID NO: 4763 - DNA, 104 bp, Homo sapiens
  source 1..104: mol_type = other DNA
aagattggtcacaatttggtaattgttgaagctggtttatgggacactgaagtcaattataacattttattttcatatatatatttttgatttccacaataaaa

SEQ ID NO: 4764 - DNA, 298 bp, Homo sapiens
  source 1..298: mol_type = other DNA
tccatgggttcaactgaccttggaatgaaaatattccacacacaaaaaaaattgcgtctgtactgaacatgtacatttttcttgttgttattccttaatacagtataacagttatttacatggcatttacattgtattacgtattataagtgatctagggatgatttaaataatacgggatgtacacaggttatatgcaaatagtccaccattttatatcagggacttgagcatccatagatgttggtatccataagtggtcctagaaccaatgccccacagatactgagggacacct

SEQ ID NO: 4765 - DNA, 6849 bp, Homo sapiens
  source 1..6849: mol_type = other DNA
ggcagagcaagatggtagaatagaagcctacattgtacacccccttagctccccaactggaacaccaaattttagcaactctctgcacacagcaaagcaccgtctcaagaacaaacaatcacgtgagcaatcacagcacctggttttaacttcatattgtggaaaggggcactgaggagggcaggagaggcagtcttgagtcaccaacaccatcccttccccatcccctggcagtgaccatgctgcaaggagagagaatctgtgcactttggggtggaagagtgcagtgactgggggactttacatggaacacagtgctgttctgtcacagtggaaaataaagccgtgctgggctcagccagctccagcacatagagggagcatttggaccagccctagccagatgtgggtcacccatcctttcaatcaaaacttgagtttcttggcaagcctcaccactgcaagccaaagtgctctggggtcctaggtaaactttaaaggtagtctaggacacaaggactacaattcctgggcaactcctagtggtaggctgggcttagagccagtgaacgagggtggtacatgacctagggagataccagctgatggctaagccatccctcccccaaccccaggcagcacagctcatagcaagggagaaagtcatagtcgtagaaggaagacgtcacagaaggaagacgggatgtcttccttctgcttaaggagaggagcatgaagaataaagaggactttgtcttttatcttggataccagctcagccacagtaagacaggacaccgggcagagtcacaaggctcccatttcaggccttagctcctgggtgatatttctagacacaccttgggccaaaagggaacccactgccttgaagggaaggaccaagtattggcagaattcatcatctgctgactaaagagccttgggccctgaataaccaccagtaataaccatgaagtacaccttggaccttgggctctgaaacatgctggcttcaggggagacccagcacattcctagctacagtggctatagtgaaagactcctgtttgagaaaagcagaggtaaaagtaaagaagactttgtcttgcaccctatgtaccagcttggccacagtaagatagagcagtaagaaggatcttgaggtccccaagtccaggcctaggctcttgaacagcatttctggacctgccctgggccagaggggagcccactgccctgaagggtgagtcccaggcctggcagcattcaccaaaagctgacataagagtccttgggctttaagcaaatatcagtggtggcctggcagaactcaccttagattactgctggtggtggccacagggaaaggcttctctgtctgtggtaagaggaaaggagagtgaaaatgactttgtatggtggtctgagtgtcagcttagccacagtagaatagaacatcaggtaaattgcaaaggtttttgactccaatcccttgttcccaggctgcatctctggacacacctggggcctgggggaactcaccacactgaaaggaagggccttcggcaagacctagtactaggccggcttcaggtctgacccagcacggtcccagtggtggtggcaagagaagtgcttgcatcaccacacccccagttccaggtggttcagccctgagcgatagagactctgtatatttgggagtaagtaaggaaaaagaacaagagtctttgcctagtaattcagagaatttttcaggatcttatccaagaccaccaaggtggtacttccatgagtctgcaaaaaccacactattattgggcttggggcccaagtccctttgaatacctggaaagccttcccaagaacagacacaaacatgcccagactgtgaagattaaaatcaatgccaaactcttcaatgcccagacaccaaagaatatctataagcattaacaccatccagaaaaacatgacctcaccaaatgaacttagtaaggcaccagggaccaatcagggagaaacagagatatatgacctttcagacacagaattcaaaatagctgttttgagaaactcaaagaagaaactcaaagaaattcaggataacacagagaaggaattcagaattctatcagataaatttaacaaagagattgaaataattaaaaagaatcaagcagaaattctagagttgaaaaatgcaattgacatgctgaataatgcatcagattatcttcatagtagaattaatcggaattagtgagcttgaagacaggatatttaaaaatatgcagtcagaggagacaaaagaaaaaagaataaaaaacaatgaagcatgcctacggatctagatgacagcctcgaaagcacaaatctaagagtttttgaccttaaagaggagataaaggtagatgatagagacagagataaagatagagatagagacagagatagagatagatacaggggtaaaacatttatttaaagggataatatcagagaattcccaaacctagagaaaaatatcaacactgaagtacaagaaggaaatagaacaccaagcagatttaacccaaataagactacttcaaagcattcaatcttcaaactcccaaaggtcaaggataaataaaaggatcctaaaagcagcaagagaaaaaaataaataacataaaatggagctccaatacatctggcagacttttcaggggaaacattacaggccaggagagagtggtatgacatatttagagtgctgaaggggaaaaatcttttagtctaaaatagtatatctggcaaaaatatcctttcagcatgaaagagaaataaagaccttcccagataaacaaaagctgagagatttcatcaccaccaaacctgtcctacagaaatgctaaagggagttcttcaatctgaaagaaaaggatgttaatgagcaagaagaaatcatctaaaggtacaaacctcactggtaacagcacacagaaaagcacagattactataacactgtaattgcagtgtataaacatctcgacttaagtagaaagactaaattatgaaccaataaaaaataaccaaaacaaattttcaagacatagtacaataaggcataaggagaaacagcaaaaagttaaaaagcagggggatgaagtgaaagtgcagtttttaatcagttttatttttgcatgtttgtttatttatgcagtcagtgttgtcatcagtttaaaataatgagttataaagtactactggcaagtctcatggtaacgtcaaatcaaaaaacataaaacagatacacaaaaaataaacagcaagaagttaaagcataccaccagagaaaattaccttcattaaaagaatacaggaaagaaggaaagaaggataataagactacaaagcaaccagaaaacaagtaaccaaacggcaggagtgagtccctacttatcaacaacagtgattgtaaattgaccatactctccaatcaaaagacacagagtggctgaatggttgaaaaaacaagatccaatcatctgtttcctacaagaaacacacttcatctttaaaggtacatgtagactaaaaataaaaggatggcaaaagatattccatgccaatggaaaacccaaaaaagagcaggaatagctatacttatatcagacaaagtagagttcaagacaaaaatggtaagaacagacaaagaaggtcattatgtaatgatacaggggtcaattcagcaagaggatataatgattgtaaatatagatacacccaacactggaacattcagatatataaaacaaatattattagagctaaaaagagaaatagacctcaatacaataatagctggagacttcaacatctcgctttcagcactggacagatctcccagacagaaaatcaacaaatattggacataatctgcactatagaacaaatagatatttacaggatctaatagatatttacagaacatttcacccaacagctacagaatatacatttttctcttcagcacatggattattctctaggatagaacatatgttaggtcacagaacaagtcttaaaagattcgaaaaaattgaaataacaccaagcatgttccctgaccagaatggaataaaactagtatgtcaacaacgaaaggaattttggaaaccatacaaacacatggaaattaaacaatgtgctcctgaattaccagtggctcgaggaagaaattaagaaggaaattgaaacctttcttgaaataaaagataatggaaacacaacatactaaaatctatgggcacagtgaaagcagtactaagagggaaatttatacctatgtgcctagttcaaaaagaagaaaaactttaaataaatagcataatgatgcatcttaaagaactagaaaagcaagagaaaactgaaccccaaattagtagaagaaaaaaattataaagatcagagcagaaataaatgaatttgaaaagaaaaaataaaaaatattaatggaaacaaaaagtggtttttttttgaaaagatgaacaaatttgacaaagctttagccagattaactaagaaaaaaagagagaaagctcaaataaataaaaccagagatgaaaaaggagacattacaactgatactgcagaaattcagaggctcattagaggctactatgagccactatatgaattggaaaatctagaagaaatggataaattcctaggcacataaaacctaccaagactgaaccatgaagaaatacaaaacctgaacacatcaataacaaataacaagattgaagccctaataaaaagtctcccagtaaagtcaagtccatcatctgatagcttcatggctgaattctgccaaacatttaaagaactaatacagtcctactaaaactgtttcaaaaaataaaggaagagagaatacttccaaactcattatatgaggccagtactaccctgataccaaaaccagacaaagatacattaaaaaaagaaaactacaggctaatatcactgaagaatattgatgtaaaaatcctcaaaaaaatactagcaaaccaaattcatcatgaccaaggggtatttatcccagggatggcaggatggttcaagatatgcaaatcaatcatcagattgatatatcatatcaacagaatgaggaacaaaaaacatatgatcattttaattgatgctaaaaaagcatttcataaagttcaacatcccttcctcaaaaacctgggtagagagggaacatacttgaacataataaaagccatatacaacagacccacagctagtattgcactcaatgggaaaaaccgacagcctttcctctaagatctaaaaaaagacaaggatgttcactttcatcactgttattcaacgtagtactgaaagtcctaactaaagaaattagacaagggaaagaaagaaagtgcatcgaaactggaaaggaagaagtcacattatcctggtttgcagatgatacgctcttatatttggaaaaacctgaagattccatctaaaaattattagaactgataagaaaattcaggaaagtttcaggatgtaaaatcaacacacagaaatcagtagcatgtctatatgccaacagcaaaaaaagaaaggaatcagaaaaagaaatcaagaaagtaatcccatgtacaatagctaaaattaagatacctaggaataaacttaaccaaagaaatgaaagatgtctgcaatgaaaactttaaaaagctaatgaaataaattgaggaggacaccaaaaaaaatgaaaagatattctatgttcatggattagaagaatcaatattttaaaaatgcccatactacccaaagcaacctacagatttaatgcaatccctatcaacataccaatggcattcttcatggaaacaggataactaatcataaaatttatatggaatcaaaaaagacccagaatagtcaaagttatcctaagccaaaagaacaaaacttgagaaatcacattacctgacttcagataataccacagataataactacagagctgtggtaaccaaaacagcatggtttttgccataaaagcggatacacagattgatggaacagtatagagaacacaggaagaaattcacacacctacattgaactcattttcaacaaagttaccaagaacttatcttggggaaaggacagtatcttcaataaatggagctaggaaaactggatatccatatgcagaagaataaaaatagacccctatgtctcaccatatacaaaagtaaaatcaaaatggattaaagacttaaatctaagacctcaaactatgaaactaccacaagaaaacatgggggaaactctccaggacattggtttgagcaaaaaatttcttgagtaataccccacaggcataggcaaccaaagcaaaaatggacatatgggatcacatcaagttaaaaagcttctgcacaacaaaggatactgtcaacgaagtgaagggacaacccacagaatgagaaaaaatatttgcaagctatctatctgacaatggattcataactataggtaaaaatctagtaatctgatcaagaaatgggcaaaagatttgaacatttctcaaaagaagacatacatatggcaaagaggcatatgaaaaagtactccacatcattgatcttcagagaaatgcaaatcaaaactacaatgagatattatctcaccccagttacaatggcttctatccaaaagtcagacaataacaaatgctggagaggatgtggagaagaaggaacctttgtacactgttggcaggaatgtaaattagtacaaccagtatggaggagagttgtaggctc

SEQ ID NO: 4766 - DNA, 305 bp, Homo sapiens
  source 1..305: mol_type = other DNA
cggggatggtggctcacacctgaaatcccagcactttgggaggccgaggcaggaagatcattgagctcaggagtttgaaaccagtctggacaacatagggagaccccatctctaccggaggaaaaaaaaaagagtcaggcctggtggtgtgcgcctgtaatcccagctactcgggaggctgaggcaggacgattacttgagcttgggaaatcaaggttgcagtgagctatgattgtgtggccacactccatcctgggtcacagagtgagaccttgtctcaaaaaagtaacataaggaaaaaagaa

SEQ ID NO: 4767 - DNA, 136 bp, Homo sapiens
  source 1..136: mol_type = other DNA
ccaaaatcttctagggatggttccaaatgtgcctgatttccctgagcagtgagcagtgcgacctttacattagcagatatatttataaatacacatatggcccgccaggacctgattggctgctgatctgatgaga

SEQ ID NO: 4768 - DNA, 90 bp, Homo sapiens
  source 1..90: mol_type = other DNA
aaaattcacatgttgatgtgaaggcaactgggtgtcatttccctttaaatagtacaaaacatatgggggcaggattgcatttgtcacaaa

SEQ ID NO: 4769 - DNA, 177 bp, Homo sapiens
  source 1..177: mol_type = other DNA
agggctggcttcatgggcatcaaaggccatgcagtcccatcggcccctacccttagaaggcctccacactatgtttaatactctgccattatcattttaaaattcttaatcatttctgaacaaggggccccacattttcattttgcactgggtcctgacaattatgaaactcgttct

SEQ ID NO: 4770 - DNA, 240 bp, Homo sapiens
  source 1..240: mol_type = other DNA
tatggttcttttacacaaaatatttggcacaaagtcagttataagacataagaaggagcaagcaaatgtcgctcttggccaagagaggaaatagtcaatagaagtagacacagagatggcccaattttggaattattaggcagggtttaaaattattatgctaagtacattccaggacttattggaaaaaatagataacatgcaggaatagatgggaaatttgagcaaagagatgggaac

SEQ ID NO: 4771 - DNA, 87 bp, Homo sapiens
  source 1..87: mol_type = other DNA
cctgagtctcagctttctcatctgtacggttgggacaagtacagtaaccctcgcccgtcaagacgggccagggctgtggcgagggtc

SEQ ID NO: 4772 - DNA, 419 bp, Homo sapiens
  source 1..419: mol_type = other DNA
ggccttaatgtgattacacgctggtctgatgttcatggccaggacattttgttttcctgttggacataaacaatctcacagaatatcaacttcagaaggttaatctgagaccgtgataagtgcaaacaaaaacaagggcactttataatgttgtctaagtgcagataaaaaacaaggtcttgatgccacccacaaaatacttaataatcatattgctcctgctttctgacagcatccaatctaaagtcttcactttctgagatcctgtccgaaatcaaccaattaaagtccaaatcgtataatagtttctctctaactcctcccactgagatgacccatagtaccccattccttgctgcaatgtaattatatttacttacaagtgtgctcctggtggtctttaactgaagggcactgac

SEQ ID NO: 4773 - DNA, 38 bp, Homo sapiens
  source 1..38: mol_type = other DNA
ccctgagtctcagctttctcatctgtacggttgggaca

SEQ ID NO: 4774 - DNA, 262 bp, Homo sapiens
  source 1..262: mol_type = other DNA
gccgataatccaagtactttggggggtcgaggtgagaggatagcatgtggccagaagttcaagaccagcctgggcaacatagcgagactccatctccacaaaaaagtgttaaaaattagccagacatggtggtgcatgtcttagttctaactactcaggaggctgagaaaggaagattactttagcccaggagctcaaaggtgcagtgaactgtgactgcactccagcccgtctaaaaaaaaaaaaaggaaaaaaaaaagaa

SEQ ID NO: 4775 - DNA, 1293 bp, Homo sapiens
  source 1..1293: mol_type = other DNA
gtaaactggtatcagtagagtgggatgctgctgaaaagatacctgaaaatgcagaagcaattttggaactgcgtaacaggcaggggttggaacagtttgaagggctcagcagaagacaggaaaatgcaggaaagtttggaacttcctagagacgttttgaatggctttgaccaaaacgctgataatgatgtgaacaatgagatccaggctgatgtggtctcagatggagttgaggaacttgttagaaactagagcaaagttgactcttgttatgttttagcaaagagactggcagcattttgcccgtgccctaaagattagtgaaacttagaacttgacagaagaattagggtatctgacagaagaaatttctaaacagcaaagcgttgaagaagtgacttgggtgcttttaaaggcattcattttataaggcaagcagagcataaaagttcagaaaatttgcagcctgacaatgtgatagaagagaaaaacccgttttctgaggagaaatttaagctggctgcagaaatttgcataagtaacgaggaactgaatgtcaatccccaagacaatggtgaaaatgtctcctgggcatgtcagaagtcttcacagcagcccttcccatcacagtctcagaggcctagaataaaatggttttgctgggcccagggtccccatgctgtgtgcagtgtagggtgttggtgccctgcatcccagccactccagctgtgactaaaagggaccaaagtatagcttgagctgttgcttcatagggtggaagccccaagccttggcagcttccacgtggtgttgagcctgtggatgcacagaaatcaagaattgaggtttgggaacatctgcttagatttcagaagatatatggaaacacctggatgcccatgcaaaagtttgctgcagagatggggccctcattgataacctctgctagggcagtgaggaagggaaatgttgggtgggagcccccacacagagtccctactggggcaccgcctggtggacctgtgggaagagggccaccatcctccagacctcagaatgttagatccaccaacaacaccatgtgcctgggaaagccacagacactcaacaccagcccacaaaagcagccagaaggcaggctatatcccgcaaagccacaggggcagagctgcccaataccatgggaacccacctcttgcatctgcatgatcaggatgtgagacatggagtcaaaggagatcattttggagctttaagatttggctgcccctctggatttcggacttgcatggg

SEQ ID NO: 4776 - DNA, 446 bp, Homo sapiens
  source 1..446: mol_type = other DNA
aatacactaaaataaaattgcttaaaactagtgataaagaaaaattctcaaagcggccaatgacaaaaacacagtttgcacagaggaacaaaaaatgccagcaaacattttattggaaacaaagaaaattagaagataatgaagcaacatctttaaagtactggaagataaacattgtcagctgggaattgtagactcagagaaactatctttcaagatgtaggtgaaataaagattttgttcaggcacttagaacctgaaagaaatcatcaccagtaaaacaacactataaaaaatgttaaagaaaatgtttcaggcagaagtaaaataatatcaaaaggaaatttggatctacatagaagaatgaaaagcactggaaatggtatcaacatggttaaatatataagatccttttatttctgtttgaattcaattgattgtttaaa

SEQ ID NO: 4777 - DNA, 173 bp, Homo sapiens
  source 1..173: mol_type = other DNA
ggggtcagcaagctatagcttcatgggtggactgcctgtttatgtgaacaaatttttactgagacacattcatgctcatttgtttatgtattatcaatgggtgctatagaattacaaaagcagaattaagtagttgtaacagagcctaatggcacacaagcctaaaatattta

SEQ ID NO: 4778 - DNA, 297 bp, Homo sapiens
  source 1..297: mol_type = other DNA
gtggctcatgcctgtaatcccagcattttgggaggccgagatgggcggatcacgaggtcaggaaattaagaccatcctgggcaacatgatgaaaccccgtatctactaaaaatacaaacattagctgggtgtggtggcatgtggctgtaatcccagctactcgggaggctgaggcaggacaatcgcttgaacccgggaggcagaggttgcagtgagctgagatggcactactgcactgcagcctggtacaaagctagactctgtctcaaaaaaaaaaaaaaaaaagagagagaagaa

SEQ ID NO: 4779 - DNA, 1585 bp, Homo sapiens
  source 1..1585: mol_type = other DNA
tataaataatacaaatatcaagaagttaaattagtatagtatgaaaacgtttaattcaataaatttggaaatatatgtaaaatgtgtacaattacttgaaacatgcatttttccaaaagtaacctaaagtgaaaagaaaaatctgaattgtgctacaacaaatgcatgtaatcagtagtcagaaatcatatcataaagataatttcaagccatgatgactttactggcaagttgtttcaaacatgaaacaaaacaataattccaatcttacatacaattctttctgagcatgaaacaggaaagaacatactctattttattttattatgctattatgactctgatattataacctgacaaggatagtaaagggaaagtaaattaaacaccaatgtaatttatgaaaatattgaaggaaaacttaaaaaagttccatgcagaaataagcaatgcattaaaatgtaagacatcacagccaatgtttattctaagaaaccctgggaagcaataatggcctcatgtaaaggtatcaattaatatgatacaccacaacaaataacttaacaatattataagcatatttaattttattttcttaaaaagtcatacattttaacaacccgaaattaaaagagaatctagtttaactgataacatttgttttcaaaagttctattgaaattataacacttaacaatggaatgttcaaatatttcctttgtgattgggaacaaaataaacatagatggtacaagcaattttatttatccttttgcaggtcttagacactgggataggattgtaaatattaaaaaaataagaattatgaaagagaaaacagattactatgttaccgatgacactaagtacacagaaaattcaaaatgattctaagatacattatactaatgaatatgagcttttagcaagatgctttgacacaaacgtattatgcaatattgaaatgcatttcaaataagtagagaactttatttagatgtgtcaatgtggcttactctcacaaacatagtatttagtggcatgattaagtcacaaaagaatacgtacagtataactcagtttaaataaagttcaaataaacatagacataacattgacataaatatattcttgaattgaaagactttaatgaaatcacttctccccaaaattaatctttgtaactagtgcatccaaagtaaaacccagtaaggtttgatttagatattgacaagctaattctagaatttatgtaaactctaaaaatattaaaattcagttaataatttattgaggaaggaaaaatatattacaggaaatataagaattaatgcaatgtggtattaacaaagtaataaataatcaatgaaatggaataggtagactacagtaaggaaaatataagaacccatgatatgtaagaaagctagtattatagatcagtggtgaaaaataaatttgccaataaatgagagtgagaaagctggctatacatatggaaaataattaaagtgattctttaccttatataatatttaacaatcaattccttggcaatcaatatttaaatgtaaagccaggcaaa

SEQ ID NO: 4780 - DNA, 450 bp, Homo sapiens
  source 1..450: mol_type = other DNA
ttttcttcaatatgactgactatagatatttgactctagttattctcagaaagagaaagcaaagttatggataaataatcgttaattccaatatctatatagacggaagtgtgctagagcaccacaagaagaaatttgaacacagaaaaataaggaagcaagaacccagcagacattatactctgagggacttgatgttccatggaaaagcataggtgggggtgtcttttgctcttctcacctctgcggcagactgcttgtttctgaactgttggagagccctccattctcacaagcccaagcactggtgtgggccgcaatcttggaacaaattgaggacagagaacaaggctactatttcctgcagtgccacttgcccttcacccagccccaagatgaggtggtgggcaccatactggatatgcctctgtggtggacttctatactgcc

SEQ ID NO: 4781 - DNA, 1258 bp, Homo sapiens
  source 1..1258: mol_type = other DNA
gccaccgttgctgggggatgggtccctgagacttggcgaagtaggagtattggactcgtgtacaggccctgtctcgcaggttttcaggtgcgcttggcgtttcctccgctttgaggggcaggtctccagtggcccccgggcgcaggcctggacatcactgtccgtctcatcgtcgcccactacggcctcagagacacaggctcactgcatgtgctcttgggggacgtcagtgccacgtgtggtcacactggctccggctcggactagcctctgtctctctttgcccgtgtcgccggaagccgcgtcgagatgccggagcccccgggccttggagatgaaggcaggcccctgctccacccaggaaggagggaggcagtgggctcgtgggtcagtgcctttgcaggcgacagcacgccttgtggccctggggatctttctgtgccccggcgagagcctttccgcctcactgcattgtaaccccattcccgatcaccgggtgggatccatcatcggatcccaagaggagtccgcgcagcccagccgacaccccgaagctcctccttcaccgagaacccaagcagaagaccgatcaaggaggtcctgacgacaggactcctatgggtccgaccctgggtctcccgcaggcccctctggtagtcctcttcccacccgccgccccgggctgcgccgcagccgccgccgcaacctccagcaccgccgccccagtccccgcagccgccgcgtcgccgccattttttaaaaggtccgcagcctgactctgccgagtaagggggggtggggcgggtgagtcggcctcgccagtgcgcatgcgcgaggcccgagccgccgctttggtcacagtgaccgccaccattgcccggggatgggtccttgagacttggcgaagtaggagccctgtgtgatcgtgcgtcagagtcggggctgagaccagccctggccagggcagttaccaggacggtctccggaggccgggattcgcggagggtccaccagcaggaagaaaccccaggaggaagaaaactcagacagatcgccggggaggcagcgcgggatcccagcctcaggcgtgcgcggacggtgtgcgggtgagtctccccaaaagtggcgcccttgtgatgtcgaggacaggtctccctgtgtgcgcgtgggctgctgtctcaccggtggctcgtagtcgcggagaccagaacccggcagcttcaggggctgcctgggggtgggtgttacctgctgtatg

SEQ ID NO: 4782 - DNA, 3741 bp, Homo sapiens
  source 1..3741: mol_type = other DNA
agcgggcagaaatcccatgaggggcagttgaggtttgaggaaggcgaggtgaggcacctgtggcagaaaaaaaaaaaaaaccgcaccacggagaagcagagcctgggtccccaacggacaaaagtgtcttcccatcagcccttgcgctgggcccaggtgaccctggcattcctggttcgagaccagggtgcgcttcaggccgctaggggtgcccaaaagcgggcagaaggcccatgaggggaaggtgatgcacctggggcagagaaaaaaaaaaaaaaaaaaaccgcgccgcctataagcggggcctggctcccccacagaagaaactgtcctcacatcagcgcttgcgctgcgccccagggaccctggtatccctggctcgagcccagcgtgcgcctcggcctgctaggggtaccccaaggcagacagaaggcccatgagggaaaggtgagacacctggggcagagaaaaaaataaaaaaactgcgccgcccagaagtggggcctgggtcccccacagacgaacgtccctacccatcagccctgaactgggccccggagaccctagcgtccctggctcgaaaccagggtgagcttcgggcccgctagtggtacctcaaggcgggcagaaagcccatgaggggaaggtgaggcacctggggaaaagcgaaaaaaacaaaaacaaaaacgtcgcagagaagcagagcctgggtccccgaggaagaaagtgtcttcgcatcagcccttgcgctgggcctcggggaccctggtgtcccagtttcgaacccagggtgtgcgtctggccactaggggtaccccaagtcggacagacggcccatgaggggaaggtgaggtttgagggaggagacgtgaggcaactgtggcaggaaaaaaaaaaaaaaaaaaaacacgccgcggagaagcggggcctgggtccccaacggacgaaagtgacttcccatcagcccctgcgctgggccccatggacactggcgaccctggttagagcccagggtgcgcctcgtgcccaataggggtatcccaaagcgggcagaatgctcattaggggaaggtgagacacctggggcagagaaaaaaaaaaaccgcgccgcaaagaagcgggacctgggtcccccacggatgaaagtgtcttcccatcagcccctgccctgggccccatggaccctggcaaccctggttcgagccccaggtgtgcttcgcgcccgctagggttacccagaagccggcagaaggcccatgagaggaaggtaagacacctggggcaaaggaaaaaaaaaaccgcgcttgcagaaaagcggggcctggctcctccacggacgaaggtgccttcccatcagcccctgcgctgggccctggggaacctggtgtccctggctggaaaccagggtgcaccttggacccgctaggggtaccccaaggagagcagaaagcccatgaggggaaggtgaggcacctgcggcagagaaagaagaaaaaccgcgcagcggagaagcggggcctgggtcccccactgacgaaagtgtctttccgtcagcccttgagctgggtcccgaggacgctgacatccctggttcgagcccacgctgcgcctcaggctgctacgagtaccccaaggaggaaagaaggcccaaaagtttcagctgaggtttgaggcaggagagatgaggcacctgtggcagaaaaaaaaaaaaaaaaaaaaaaaaacgcgcagcggagaactggtgcctgggtctcccagggacgaaagtgccttcccatcagccactgcgcttggccccatggaacctggcctccatggttcgagcccagggtgcgcctcgggccgctaggggtaccccaaagtgtgcagaaggcccatgaggggaaggtgaggcacctggggcagagaaaaaaaacaacaaaaaacctcgccgcggagaagcggggactgggtccccccaacggacgaaagtgtcttcccatcagcccttgcgctgggccacagggaccctggcttccctggttcgagcccacagtgcacctcgggccgctaggtgtaccccaaggcagacagaaggcccatgaggggaaggtgaggtttgagggaggagcggtgaggcacctgtggcagaaaaaaaaaacgccccacggagaagcagggcatgggtcccccacggacgaaggtgccttcccatcaggccctgcgctgagccccgtggaccctggcgaccttggctcaaacccagggtgcgcctcgggccgttaggggtaccccgaggcgggcagaaagcccatgaggggaagttgaggtttgagggaggagaggtgaggcacctgtggcagacaaaaaaaaaaaaaaaaaaaaaaaaccgcaccgcagagaagcggggcctgggtccgccacggacgaaagtgtcttcccatcagcccttgcgctgcgccccggggaccctgacgaccctgattcgagccgagggtgcgcctcggtccactaggggtaccccaaagcaggcagatggctcatgaggggaaggtgaggtacctggggcagccaaaagaaaaaaaaaactgcgccgcggagaagcggtgcctgggtcccccacggacgaaagtgtcttcctatcagcccttgcactgggccccgggaaccctggcgtccctggttcgaccccatggttcgcctcgggccgctaggggtaccccaaggtgggcagaaggcccatgaggcgaaggtgaggtttgagggaggagaggtgaggcacctatggcagaaaaaataaaaacgcgccacggagaaggggggcctgggtcccccacggacgaaagtgctttaccattagcccctgcgcttggccccgtgcaccctggcgaccctggttcgaacccagtgtgcgcctcgggccgctagccgtaccccaaagtgggcagaagcccatgaggggaaggtgaggcacctggggcggagaaaaaaggaaaaaacctcgccacggagaagggaggcctgggttccccacgaaagaaagtgccttcccatcagacccggtgctaggccccagggaccctggcatccctggttcgagcccagggtgcgccttgggccgctgggggtaccccaaggcggacagaaagcccatgaggggaaggtgaggcacctgtggcagaaaaaaaaaaaaaccgcgccgcagtgaagctgggcctgtgtcccccactgacgaaagtgccttcccatcaggccttgcgctggacctcgcggacactggggaccctggttcgagcccagggtgcgccttgggcccgctaggggtacccagaagcgggcagaaggcccatgaggggtaggtgaggcacctgaggcagagaaaaaaaaaaactgtgccgcggagaagcggggcctgggtaccccacggaagaaagtgtcttcccatcagcccctgagctgggcccaggggaccctggcatccctggttcaagaccagggtgcgcttcgggcctcttggggtaccccatggcgggcagaaagcctatgaggggaaggtgaggtttgagggaggagaggtatggcacctgtggcataaaagaaaaaaaaaaccgcgccacacccttgcgctgagccccagggaccctggcacccctggttcgagtccagtgtgttcctagggcggctaggggtaccgcaagtcggacagaaggcccatgaggggaagtgaggtttcaggaagtagaggtgaggcacctgtggcag

SEQ ID NO: 4783 - DNA, 1433 bp, Homo sapiens
  source 1..1433: mol_type = other DNA
caagcatacctcattttattttgcttcagtttattgcactttgcagatactgtgtttttgacaaattgaaggtttgtagcaaacctgcatcgagtaagtgcattggcactattttttccaaacagtatgtgctcacttcatgtctctgtgtcacattttgataattctagtaatatttcaaacttttccgttgttattataatatctattacgaagatccatgaacagtgatgttttgtgttactattgtaattgttttagggtgtcatgaactggcccatataagactaaaatgacaaacttaaccaataagtgttgtgtgtattctgactgttccacagagtgcccattccctatctctctccctctccttgtgctcttgtattccttaaaacacagcagtattgaaattaagccaattaataaccctagaatggcctttaagtattcaagtgaaaggaggagtcgcacatatctcactttaactcaaaagctagaaatgcttaagcctattgaggaaggcatgtctaaaaccaattgtgtcaaacatttagccaagttgtgaatgcaaaggaaaagttcttgaaagaaattagaagtgctcctcccatgaacacaagaaggatatggaagcaaaatatcctcattgctgatacggagaaagtttgagtggtctggatggacagtcatactgaccacaaaattccctcaagctaaagcctaatccagattaagccctaactctcttcagtgttacaaaggctgagagacgtgagggagcttcacaagaaaagttggaagctagcagaagttggtttatgaagtttaaggaaaaaaagctgtctccataagataaaagggcaagttgaagcagcaagtggtgatgtaggagctgcagcaagttctccaggagatctaactaaaatcactgatgatgatggctacactaaacagactttcaatgtagataaaacagccttctattggaagaagatgccatctaggactttcatagctacagaggagaagtcaatgcctggcttcaaagcttcaaaggacaggctggctcccttgttaggggctaatgcagctggtaactttaagttgaagccagtgttcatttaccattttgaaaatcctagggcctttaagaattatgctaatctattctgcctgtgatctataaatggaacaacaaagcctggatgagagcacatctctttacgtcatggtttactgagtattttaagtcctctgttgagacctactgctcaaaaaagaaagatttccttcaaaatattactagtcattaacaatgcacctggttactgaagagctctgatggagatgtacaaggagattaatgtgttttcatgattggtaacacaacatcccttctgcagcccaaggatcaaggagtaatttcaactttc

SEQ ID NO: 4784 - DNA, 214 bp, Homo sapiens
  source 1..214: mol_type = other DNA
aaatacttaataatcatattgctcctgctttctgacagcatccaatctaaagtcttcactttctgagatcctatccgaaatcaaccaattaaagcccaaatcgtataacagtttctctctaactcctcccactgagatgacccatagtaccccattccttgctgcaatgtaattacaagtgtgctcctggtggtctttaactgaagggcactga

SEQ ID NO: 4785 - DNA, 215 bp, Homo sapiens
  source 1..215: mol_type = other DNA
aaatacttaataatcatattgctcctgctttctgacagcatccaatctaaagtcttcactttctgagatcctgtccgaaatcaaccaattaaagcccaaatcgtataacagtttctctctaactcctcccactgagatgacccatagtaccccattccttgctgcaatgtaattacaagtgtgctcctggtggtctttaactgaagggcactgac

SEQ ID NO: 4786 - DNA, 2988 bp, Homo sapiens
  source 1..2988: mol_type = other DNA
attaacaggattgaaaggataaacccacagttctatagtcacagttggacccttcaatacctcattttaattaatggatagaaaaaccagaccgaagcttcatgagaaatacaagagttaaacaacggtataagccactgagagctaatacgcatatacaggacagtccatccaacaacagcagaatatacattcctttcaagtgtatatggaagttctctaggatgggccatatcttcatccacaaaatatgtcctaatcatttttaaaagtttgaaatcatacaaaatataatttacaaccacaatggaagaaacaacagataaataagtgaaaactggaaaattcacgaaaatgtggaaattaaacaatacagtcttcaactaccagtgagtgaaaaaaataaatcacaagcaaaattataaaatatcttgagataaattaaaataaaaacaaaacataccaaaacttattgaatgcagtgaaagtagagttcaaaggaaaatttatggatataaataactacatttaagaaaaatctgaaatcaacatcctcactctatacctaaaggcagtggaagaagacaaaataagactaaatccaaagctagcagtatgaaagaaataatagagagcataattagagcataaatcaataaaatagaagtttggagagcagtagaatgaataaacatagattatttgaaagatcaagcctttcactatattgactgagcaaaagatggaagactaattattaaaataataaatgaaagcagagccattactaccaactttacagaaatacaaaaggattacaggagtatactgtgaacaactgtctaacaacaaattagctgtcctggatgaaatggacgaatcactagaaagacacaaactaccaaagtggctcaagaagaaagagaaaatctgaatagacctataacctagcagattgaattagtaatcgaaagtgattaacaaagaaacatttatgaccaaatagctgcattaactggtgagtcaacctaacatttaaagaagaattaataccatttcttctcaaactcttctgacataatatatgaagaaggaatacttgctaattcattttttgataacagcattatccttataccaaagccaaagagagcacaaaaagagaactacagcacaatatcccttatgaatatataagcaaaaatctcagcaaaatactagcagcaatactgtataatcaaaggattgtaaactatcaccctgtgagatttatccccaaaatgcaagggtggctcaacatataaaaaatcaatcagtgtaatatactctaacagtaaaatgaataagcacgtgattatttcaattgatgcagagaaaacattgatgaaatacaacacccttctataataaaaatactcaataaactaggcatagaagggattttctgcaacgtgacaataggatgtacaaaaacccaacagttaatatcatgatcaatgatgaaacactgaaagctgttttcctaacatctagaacaagacaagcatggtgcatttgccacttgtgttcaatgtaccactggcaattttagccagagcaattaggcaagacaaagaaataaaaggcatctacattagaaataaaaaacagaagtaaaattatatctacacatgatcttatgtgtataaagctccaaataaaacacaaaaccgattataactaataaaagaggcaggatgcaaaacaaacataggcaaatgagctatatttctatatagttgtaaagaactatgaaaacattttaaaaattccatttataatagcatcaaagaataagttattcaggcataaatctaaccatggtggtatacacaaaactttgctgaaaaaaacgaaagagagtggaaataactggaaagacattctgtgttcacgggttgtaagacaatactgttaagatgacaataccatctaaagtaatctacagattcaatgcaataccatcaaaatcccaaaggcatttctgcagaaagaaagaaactcattctacaattcatacaaaaattcaaaggatctgacagacaaaacagtcttgaaaaagaatattagaaaactcacatttttcagtttcacagcctactacaaatctacagtaatcaagagagtgtggtactggcataagactaatagacttttagaccaatacaacagaacagatttaagatcctacaaattagcgctcacatatatggtcaatgactgttcaacaagctgtccaagtctagtcaagggaggaaagaacagtctcttcaacagctggatgtcagtgcacaagagagaagttagacccctaccttgcagtatacacgaaaattaattctaaattaataaaagacttacatgtaaggactaaagtatgtaactcttagaagaaaacacaaggtaaacctttatgacctttgagttttaagtgtattttgaaatatgacagaaaagcacagataacaaaagaaaatacacgtaaattagatttaatcaaaataaaaaacctttatgcatcaaaggatactatcaagggagtgaaaagacaacccatagtatgtgagaaaatatgtatctgataaaatcaaagtgcgtatctgataaaagcttaatatcccacaactcaacatcagaatttctaacatcccaattaaaaaataggcaaaggacttgaatagacatttctccgaagaagatacacaaatgtgtaagacggataagaaaagatgctaaacactgttattcattaataaaatgcaagacaaaacccaaatgagataccactttgcatccactagtaaggctttcataacaacgacacagaaaatcaatgttgctaaggaggtggagaaattggagccctcatgaactggctgctaggaatagaaaatgatgcacttgccgtggaaaacaatttggtggttcctcacagaatcacacagagaa

SEQ ID NO: 4787 - DNA, 4380 bp, Homo sapiens
  source 1..4380: mol_type = other DNA
aagcgggcagaaatcccatgaggggcagttgaggtttgaggaaggcgaggtgaggcacctgtggcagaaaaaaaaaaaaaccgcaccacggagaagcagagcctgggtccccaacggacaaaagtgtcttcccattagcccttgcgctgggcccaggtgaccctggcattcctggttcgagaccagggtgcgcttcaggccgctaggggtgcccaaaagcgggcagaaggcccatgaggggaaggtgatgcacctggggcagagaaaaaaaaaaaaaaaaaaaaccgcgccgcctataagcggggcctggctcccccacagaagaaactgtcctcacatcagcgcttgcgctgcgccccagggaccctggtatccctggctcgagcccagcgtgcgcctcggcctgctaggggtaccccaaggcagacagaaggcccatgagggaaaggtgagacacctggggcagagaaaaaaataaaaaaactgcgccgcccagaagtggggcctgggtcccccacagacgaacgtccctacccatcagccctgaactgggccccggagaccctagcgtccctggctcgaaaccagggtgcgcttcaggcccgctagtggtacctcaaggtgggcagaaagcccatgaggggaaggtgaggcacctggggaaaagcgaaaaaaacaaaaacaaaaacgtcgcagagaagcagagcctgggtccccgaggaagaaagtgtcttcgcatcagcccttgcgctgggccccggggaccctggtgtcccagtttcgaacccagggtgtgcgtctggccactaggggtaccccaagtcggacagaaggcccatgaggggaaggtgaggtttgagggaggagacgtgaggcaactgtggcaggaaaaaaaaaaaaaaaaaaaaacacgccgcggagaagcggggcctgggtccccaacggacgaaagtgccttcccatcagcccctgcgctgggccccatggacactggcgaccctggttagagcccagggtgcgcctcgtgcccaataagggtatcccaaagcgggcagaatgctcattaggggaaggtgagacacctggggcagagaaaaaaaaaaaccgcgccgcaaagaagcgggacctgggtcccccacggatgaaagtgtcttcccatcagcccctgccctgggccccatggaccctggcaaccctggttcgagccccaggtgcgcttcgcgcccgctagggttacccagaagccggcagaaggcccatgagaggaaggtaagacacctggggcaaaggaaaaaaaaaaccgcgcttgcagaaaagcggggcctggctcctccacggacgaaggtgccttcccatcagcccctgcgctgggccctggggaacctggtgtccctggctggaaaccagggtacaccttggacccgctaggggtaccccaaggagagcagaaagcccatgaggggaaggtgaggcatctgcggcagagaaagaagaaaaaccgcgcagcggagaagcggggcctgggtcccccactgacgaaagtgtctttccgtcagcccttgagctgggtcccgaggacgctgacatccctggttcgagcccacgctgcgcctcaggctgctacgagtaccccaaggaggaaagaaggcccaaaagtttcagctgaggtttgaggcaggagagatgaggcacctgtggcagaaaaaaaaaaaaaaaaaaaaaaaaaaaaaaaaaacgcgcagcggagaattggtgcctgggtctcccagggacgaaagtgccttcccatcagccactgcgcttggccccatggaacctggcctccatggttcgagcccagggtgcgcctcgggccgctaggggtaccccaaagtgtgcagaaggcctatgaggggaaggtgaggcacctggggcagagaaaaaaaaaaaacacctcgccgcggagaagcggggactgggtccccccacggacgaaagtgtcttcccatcagcccttgcgctgggccacagggaccctggcttccctggttcgagcccacagtgcacctcgggccgctaggtgtaccccaaggcagacagaaggcccatgaggggaaggtgaggtttgagggaggagcggtgaggcacctgtggcagaaaaaaaaaacgcgccacggagaagcagggcatgggtcccccacggacgaaggtgccttcccatcaggccctgcgctgagccccgtggaccctggcgaccttgactcaaacccacggtgcgcctcgggccgttaggggtaccccgaggcaggcagaaagcccatgaggggaagttgaggtttgagggaggagaggtgaggcacctgtggcagacaaaaaaaaaaaaaaaaaaaaaaaaccgcaccgcagagaagcggggcctgggtccgccacggacgaaagtgtcttcccatcagcccttgcgctgcgccccggggaccctgacgaccctgattcgagccgagggtgcgcctcggtccactaggggtaccccaaagcaggcagatggctcatgaggggaaggtgaggtacctggggcagccaaaagaaaaaaaaaactgcgccgcggagaagcggtgcctgggtcccccacggacgaaagtgtcttcctatcagcccttgcactgggccccgggaaccctggcgtccctggttcgaccccatggttcgcctcgggccgctaggggtaccccaaggcgggcagaaggcctatgaggcgaaggggaggtttgagggaagggaggtgaggcacctatggcagaaaaaaaaaacgcgccacggagaaggggggcctgggtcccccacggacgaaagtgctttaccattagcccctgcgcttggccccgtgcaccctggcgaccctggttcgaacccagtgtgcgcctcgggccgctagccgtaccccaaagtgggcagaagcccatgaggggaaggtgaggcacctggggcagagaaaaaaggaaaaaacctcgccacggagaagggaggcctgggttccccacgaaagaaagtgccttcccatcagacccggtgctaggccccagggaccctggcatccctggttcgagcccagggtgcgcctcgggccgctgggggtaccccaaggcggacagaaagcccatgaggggaaggtgaggcacctgtggcagaaaaaaaaaaaaccgcgccgcagtgaagctgggcctgtgtcccccactgacgaaagtgccttcccatcaggcattgcgctggacctcgcggacactggcgaccctggtttgagcccagggtgcgccttgggcccgctaggggtacccagaagcgggcagaaggcccatgaggggtaggtgaggcacctgaggcagagaaaaaaaaaactgtgccgcggagaagcggggcctgggtcccccacggaagaaagtgtcttcccatcagcccctgagctgggcccaggggaccctggcatccctggttcaagaccagggtgcgcttcgggcctcttggggtaccccatggcgggcagaaagcctatgaggggaaggtgaggtttgagggaggagaggtatggcacctgtggcataaaagaaaaaaaaaaccgcgccacagagaagcagggcctgggtcccccaaggacgaaagtgccgtctcatccgcccttgtgctgggccccggggaccctgtcgtccctggctcgaatccagggtgcgcctctggcctgctaggggtaacccaaagcgggcagaaggcccatgaggggaaggtgagtcacctggggtagagaaaaaaaaaaaaaacacagcgctgcggagaagcggggcctgggtcccccacgggtgaaagtgtcttcccatcaacccttgcgctgggccccggggaccctggcgacccttatttgagcccagcgtgtgcctggggccactaggggtaccccaaagcgggcagaagacccatgaggggaaggtgacccacctggggcagagggaaaaaaaaacgcgccacggagaagcggggcctgggacccccacggaagaaagtgtctccccatcagcccttgcgctgtgccctggggaccctggcatccctggttcgagcccagggtgcgcctcgggccgccaggggtaccacaaggtggacagaaggcccatgaggggaaggtgaggcacctggggcagagaaaaaaaaaaactgcgccgccgagaagtgaggactgggtcccccacggacgaaagtgtattcccatgaacccttgcgctgagccccagggaccctggcacccctggttcgagtccagtgtgttcctagggcggctaggggtaccgcaagtcggacagaaggcccatgaggggaagtgaggtttcaggaagtagaggtgaggcacctgtggca

SEQ ID NO: 4788 - DNA, 1256 bp, Homo sapiens
  source 1..1256: mol_type = other DNA
ccaccgttgctcggggatgggtccctgagacttggcgaagtaggagtactggactcgtgcacaggccctgtctcgcaggttttcaggtgagcttggcgtttcctccgctttgaggggcaggtctccagtggcccccgggcgcaggcctggacatcactgtccgtctcgtcgtcgcccactacggcctcagagacacaggctcactgcatgtgctcttgggggacgtcagtgccacgtgtggtcacactggctccggctcggactagcctctgtctctctttgcccgtgtctccagaagccgcgtcgagatgccggagcccccgggccttggagatgaaggcaggcccctgctccacccaggaaggagggaggcagtgggctcgtgggtcagtgcctttgcaggcgacagcacgccttgcggccctggggatctttctgtgccccggcgagagcctttccgcctcactgcattgtaaccccattcccgatcaccgggtgggatccatcatcggatcccaagaggagtccgcgcagcccagccaacacccgaagctcctccttcaccgagaacccaagcagaagaccgatcaaggaggtcctgacgacaggactcctatgggtccgaccctgggtctcccgcaggcccctctggtagtcctcttcccacccgccgcccggggctgcgccgcagccgccgccgcaacctccagcaccgccgcaccagtccccgcagccgccgcgtcgccgccattttttaaagggtccgcagcctgactctgccgagtaaggggggtggggcgggtgagtcggcctcgccagtgcgcatgcgcgaggcccgagccgccgctttggtcacagtgaccgccaccgttgcccgggtatgggtccctgagacttggcgaagtaggagccctgtgtgatcgtgcgtcagagtcggggctgagaccagccctggccagggcagttaccaggacggtctccggaggccgggattcgcggagggtccaccagcaggaagaaaccccaggaggaagaaacctcagacagatcgccggggaggcagcgcgggatcccagcctcaggcgtgcgcggacggtgtgcgggtgagtctccccaaaagtggcgcccttgtgatgtcaaggacaggtctccctgtgtgcccgtgggctgctgtctcaccggtggctcgtagtcgcggagactagaacccggcagcttcaggggctgcctgggggtgggtgttacctgctgtatgt

SEQ ID NO: 4789 - DNA, 450 bp, Homo sapiens
  source 1..450: mol_type = other DNA
tttttcttcaatatgactgactatagatatttgactctagttattctcagaaagagaaagcaaagttatggataaataatcgttaattccaatatctatatagacggaagtgtgctagagcaccacaagaagaaatttgaacacagaaaaataaggaagcaagaacccagcagacattatactctgagggacttgatgttccatggaaaagcacaggtgggggtgtcttttgctcttctcacctctgcggcagactgcttgtttctgaactgttggagagccctccattctcacaagcccaagcactggtgtgggccgcaatcttggaacaaattgaggacagagaacaaggctactatttcctgcagtgccacttgcccttcacccagccccaagatgaggtggtgggcaccatactggatatgcctctgtggtggacttctatactgc

SEQ ID NO: 4790 - DNA, 1585 bp, Homo sapiens
  source 1..1585: mol_type = other DNA
ataaataatacaaatatcaagaaggtaaattagtgtagtatgaaaacgtttaattcaataaatttggaaatatatgtaaaatgtgtacaattacttgaaacatgcatttttccaaaagtaacctaaagtgaaaagaaaaatctgaattgtgctacaacaaatgcatgtaatcagtagtcagaaatcatatcataaagataatttcaagccatgatgactttactggcaagttgtttcaaacatgaaacaaaacaataattccaatcttacatacaattctttctgagcatgaaacaggaaagaacatactctattttattttattatgctattatgactctgatattataacctgacaaggatagtaaagggaaagtaaattaaacaccaatgtaatttatgaaaatattgaaggaaaacttaaaaaagttccatgcagaaataagcaatgcattaaaatgtaagacatcacagccaatgtttattctaagaaaccctgggaagcaataatggcctcatgtaaaggtatcaattaatatgatacaccacaacaaataacttaacaatattataagcatatttaattttattttcttaaaaagtcatacattttaacaacccgaaattaaaagagaatctagtttaactgataacatttgttttcaaaagttctattgaaattataacacttaacaatggaatgttcaaatatttcctttgtgattgggaacaaaataaacatagatggtacaagcaattttatttatccttttgcaggtcttagacactgggataggattgtaaatattaaaaaaataagaattatgaaagagaaaacagattactatgttaccgatgacactaagtacacagaaaattcaaaatgattctaagatacattatactaatgaatatgagcttttagcaagatgctttgacacaaatatattatgcaatattgaaatgcatttcaaataagtagagaactttatttagatgtgtcagtgtggcttactctcacaaacataatatttagtggcatgattaagtcacaaaagaatatgtacagtataactcagtttaaataaagttcaaataaacatagacataacattgacataaatatattcttgaattgaaagactttaatgaaatcacttctccccaaaattaatctttgtaactagtgcatccaaagtaaaacccagtaaggtttgatttagatattgacaagctaattctagaatttatgtaaactctaaaaatattaaaattcagttaataatttattgaggaaggaaaaatatattacaggaaatataagaattaatgcaatgtggtattaacaaagtaataaataatcaatgaaatggaataggtagactacagtaaggaaaatataagaacccatgatatgtaagaaagctagtattatagatcagtggtgaaaaataaatttgccaataaatgagagtgagaaaactggctatacatatggaaaataattaaagtgattctttaccttatataatatttaacaatcaattccttggcaatcaatatttaaatgtaaagccaggcaaaa

SEQ ID NO: 4791 - DNA, 305 bp, Homo sapiens
  source 1..305: mol_type = other DNA
ccggttctggtggctcatgcctgtaatcccagcattttgggaggccgagatgggcggatcacgaggtcaggaaattaagaccatcctgggcaacatgatgaaaccccgtatctactaaaaatacaaacattagctgggtgtggtggcatgtgcctgtaatcccagctactcgggaggctgaggcaggacaatcgcttgaacccaggaggcagaggttgcagtgagctgagatggcactactgcactgcagcctggtacaaagctagactctgtctcaaaaaaaaaaaaaaaaaagagagagaaga

SEQ ID NO: 4792 - DNA, 173 bp, Homo sapiens
  source 1..173: mol_type = other DNA
aggggtcagcaagctatagcttcatgggtggactgcctgtttatgtgaacaaatttttactgagacacattcatgctcatttgtttatgtattatcaatgggtgctatagaattacaaaagcagaattaagtagttgtaacagagcctaatggcacacaagcctaaaatattt

SEQ ID NO: 4793 - DNA, 264 bp, Homo sapiens
  source 1..264: mol_type = other DNA
ccgataatccaagtactttggggggtcgaggtgagaggatagcatgtggccagaagttcaagaccagcctgggcaacatagcgagactccatctccacaaaaaagtgttaaaaattagccagacatggtggtgcatgtcttagttctaactactcaggaggctgagaaaggaagattactttagcccaggagctcaaaggtgcagtgagctgtgactgcactccagcccgtctaaaaaaaaaaaaaaaaggaaagaaaagaaaa

SEQ ID NO: 4794 - DNA, 811 bp, Homo sapiens
  source 1..811: mol_type = other DNA
ggatcattctgtgttgcagcgaggccctgcctgcctcaccagatgtggtgagcctatcctatctcactccgaggggtccaaaatcggatctgaacgggagtctggagaacacagcaggcatcctgaagctccacctccctcggtggaagtcagctcaaggaggtcctgaggacaggactcctaggggtttggccctgggacaggacaagacacccgcggccccctctcccacgccgcccgaaactggaccccggatccagctgccgcagtggcggcaggaggaacctcgctgccgccgcgcggcggtggcggtatttaaaggggacgcagccatactgccaggagcggagcgcgagtcggctcagccaatgcacatgcgcgaggcgggagcggtttctcccgtcacagtggttcccatggttgtcttagaaaccagtccccgaggcttggcaaagcaggagccctctgtggcagtgcttgggtgtcggggctctgaggatccggcctcacctctccacggggtcgacgggaacgtctccggatgccaggagtcgcaaagggccgaccacgatgaggaaaccccaggcggggacgggggaagcagcacgggatcccagcctcaggcctgcccggacggtgttggttggggtgagtctccccaaaagtcgtgccgccatccgtgatctcgaggacaggtcggcctgcgtgcccctgggctgctctctcacccgagggtcgttctcgtcgtgagcagaaccccgcagcctcaggggttgcctggtggtgtgtgtttcaatgcctctgctgtatg

SEQ ID NO: 4795 - DNA, 38 bp, Homo sapiens
  source 1..38: mol_type = other DNA
cctgagtctcagctttctcatctgtacggttgggacaa

SEQ ID NO: 4796 - DNA, 225 bp, Homo sapiens
  source 1..225: mol_type = other DNA
aaaatacttaataatcatattgctcctgctttctgacagcatccaatctaaagtcttcactttctgagatcctgtccgaaatcaaccaattaaagtccaaatcgtataatagtttctctctaactcctcccactgagatgacccatagtaccccattccttgctgcaatgtaattatatttacttacaagtgtgctcctggtggtctttaactgaagggcactga

SEQ ID NO: 4797 - DNA, 393 bp, Homo sapiens
  source 1..393: mol_type = other DNA
gatatagaaagttcatgatatagacaccattaaatactgtgcagccataaaaatgaacaagattacgtcctttgcagggacatggatggagctggaggcctttatccttagcaaactaacgcaggaaaagaaaaccaaatacctcatgttctcacttataagtgggagctaaatgatgagaacacatggacgcatagagggaacaattcacactagggcctttcagaggatggaggtggggaggagggagaggatcaggaaaaataactaatgcatactagcttaatacctgggtgatgaaataatctgtacaacaaacccccatgacacaagttcacccatgtaacaaacctgcacatatatccctgaaattataatagaaattataaaaca

SEQ ID NO: 4798 - DNA, 464 bp, Homo sapiens
  source 1..464: mol_type = other DNA
tcacctttcccctagttgatgtaaagtatataaattgttgctatttgtttgaactattattgatgctagccaagcagtatacttgatgtgaagatgtcatgctatcacaatatgctaagagctcacaaaaataagatagaatttccaggacaaacatctttggaattgtgagtgaaggatatagtggcaggcttgtccctctttaattaatactcttggtatttgtggtgatgggaggatgctgttactaggagagttttgagatactgcagtggatgtgggatgtatatgaacttcttcataatgtactcctgggaactgggtaggacatatccatattgtagttcccaaggtgtctggttgagagttagagaacttttaaatttctttagccagacaggtctctatttttttaagttatccaggactccaagaaccatagttactgaaaagggagtcctgat

SEQ ID NO: 4799 - DNA, 1870 bp, Homo sapiens
  source 1..1870: mol_type = other DNA
aagccctgacttctgaatagcacttctggacccagccagggactgagggatctcactgccctaaaggaaagaacacaggcctgtctggctttgccacctgctaattgtagagaccaaaggccttgagtgaacatagggagtcgtcagaaattgcatgcagcaggacttgagcaagacctgtgctgtgctagcttcaggtctgatccagggcagtcatagtggtggtggccagaggtgcttgtgtctttcttctcccagctttaggtggcttagaacagagagaaagactctgtatctttgagagaaaataagggtagggaaagagtctgtggctagtaatccagaaaattctcctggatcttgttgaaggctgtcaaggtggtacttctctgagtctggaagaattacagcattattgggtataaggtgctccataaagcagatatggcttagatcacaacacccaactcttttcaaatatgtgaaaagccttcccaagaaagatagctacaaataatcccagacagtgaagactacaataaatactcaccttttctctctttaaattttattttttaaacttctcatatggtgctgcatgcccaagattttaatgtccagacactgaagaacatctactagcatcaacaccatccaggaaaacatgacctcaccaagtgaactaaataaggcactggggacaaatcctggagaaaaagagatatgtgatgtttcagacagagaattcaaaatagctgtatttaaaaaaaaaaaactgaaagaaatttaagataacaaagtaaggaaattccaaattttatcagctaaactcaacaaagagattgaaatagttacagtaaattaagcagacattctgagctgaaaaatgcaattggcatgctgaagaatgcattagagccatgtaatagcagaatggatcaagcagaagaaatagtgagcttgaagacaggctctttgaaaatacatagaagagacaaaagaaaaagaataaaaacaacaaatcatgccgacaggatctagaaaatagcctcacaaagacagatctaagagttatttgttttaaagaagatgtaaagaaagaggcaggggaggatctagaaaatagcctcacaaagacagatctaagagttattggttttaaagaagatgtagagaaagaggcaggggtagaaaaatttattcaaagggataataacagagaactttccaaacctagagaaagacatccatatccaactacaaaaatgttatagaacattaagcagatttaacccaaaaaacactacttcgaagcattcaatagtcttccaaaagtcaaagataaaagttcttaagcaagaaagagaaaagaaacaaataacctactggggagctccaacatgtctggcagcagactttacagtggaaactctactggccgggagagagaagcaataaatatttaaagtactaaaggaaagaaacttttaccttagaatagaatatacagtgaaaatgttcttcaaaaaaaaagaatactgactttttcagacaaacaaaagctgaagtattttatgaataccatacctgtcctaaaggaatgctaaagggagtacttcaatcaggaagaaaaggacattaatgagtaataaatgatcacctaaaggtaaaaaaaaatcctcactgctaataggatacaaaacaaaacagaatattataacactatagctgtgtggtgtgcaaactactcttatttaaagtaggaatactaagtaatatccaatcaaaagtaatagctacaacaacatttcaagacatagcacaataaaatataaatagaaacaacaaaaagttaaaaagttaagggatg

SEQ ID NO: 4800 - DNA, 2260 bp, Homo sapiens
  source 1..2260: mol_type = other DNA
aatgcccatatcaaaaaattagaaatatctcaaattaacaacctaacatcacaactgaaagaattagagaagcaaggagaactcaaccacaaagcttatagaagacaagaaataactaaaatcagagctgaattgaaagaaattgagacatgaaaaactgttcaaaagatcacttaatcaaggttttttgaaaaaattactaagatagggcactagctagattaataaagaagatgagagaagattcaaataaagaaaattagaaatgatgaagggaatgttaccactgaccccagagaaaaaaaaataacaaccagtaactactacgagcacctctatacacacaaactagaaaccctagaagagattaataaattcctggacacatatactctctcaagactgaaccaggaagaaattcagtctctgagcagaccaattatgagctccaaaaattgaatccgtaataaatagcctaccaacccccaaaaagcccaggacctgatagattaacaaattttaacagatgtacaaagaagagccagtaccagtcctactgaaactatttcaagaaatagaggaggagggactcttccccatcttgttctatgaggccagaatcatcctgataccaaagcctggcagtgacaaaacaaaaaaagaaaacttcaggccagtatccttgatgaacatccattcaatgatccacaacaaaatacttgcaaactgaatctagcaacacatcaaaaggctaattcaccatagtgaaataagcttcttccctggaatagaagggtggtccatcatgggcaaatcaataaaatgtgattcataacataaataaaactaaagataataaccacgtgattgtctcaacagatgcagaaaagactttcagtaaaattcaacaaagcttcaagttaaaaattctcaataaatgaggtatcaaaggaacatacctcaaaataataaaggccacctatgacaaactcacagccaacattatactaaatgggcaaaatcttgaagcatcctccttgaaacccgcacaagacaagcatgccctctctcaccactcctattcaacatagtattagaagtcctttctggagcaatcagacaagagaaagaaataaagcgtatttaaatagaaagagaagtccaactacctctgtttgcagacaacataattctgtatctaaaccctatagttgtgacccaaaactccttaagctgataaacaacttccacaaagtttcaggacacaaaatcaatgtacgaaatttgctagcattcctatacaccaagaagagccaaactaagagccaaatcagagaggcaattttattcacaatttccacaaaaagaataaagtacatacaaatacagctaaccagggaggtgaaaaatctctacaatgaaaattacaaaacactgctcaaagaagtcagagaagacacaaataaatgaaaaatcattccatcttaatggagagaaagaattaatatcatttaaatggttgtactgtccaaagctattcctattaaactaccaatgacatgcttcacagaagtagaaaaaagctatttaaaaattcatatagaaccaagaaagaacctaagtagccaaggcaatcctaagcaaaaagaacaaagcttgaggcatcacattacccgacttcaaactaacctacagcaccatagtaaccaaaacagcatggtactagtacaaaaacagacacatacaccagtggaacagaatagagaggttagaagtaagaccacatacctacaactaggtaatctttcacaaagctggcaaaaacaatcaatggggaaaagattccctattcaataaatggtgctgggataactggctagccatatgcagaagattgaagttggacttcttccttataccatatacaaaaatcaactcaaggtggattaaatacttaaatgtaaaacccaaaactataaaagctctggaagacaacctagacaataccatcctggacatagaaagaggcaaagatttcatgataaagacaccaaaaacaacaaatacaactattgacaagtgggatctaattaaacttaaaagcttctgctcagcaaaagaaattatcaatagagtgaacaacctatagaatgaggaaaaaatatttacaaactatgtatctgacaaagatctaatattcaatatgaggaacttaaatttacaagagaaaaacaaaaaaccctattaaaaagtggccaaa

SEQ ID NO: 4801 - DNA, 3046 bp, Homo sapiens
  source 1..3046: mol_type = other DNA
agacagagtaagagggcagaatagaagcctacattctcatccaccacacgaaaacaccaaattttcacaactaactacattcaagaagcactgtcaaagggaccaaaaattgggtgagcaatcacagtacctggtattaacttcatatcactgaaacagacattggagaagacaaaaaaataaaagacggtttagaagcatggatgccacctctttttcaaccaccactagtggctacatcgtgcagagatagtatgtttgggagagggagcgcatagtttgtgaggctttgcaataaactcagtactaccctgtcacagtgaaaagcagaaccagactgtactcagctgacatctgccaatggaaggagcatgtgtattggccctagaaagaggaaaacctcccatcctagtgttgggagcttgagtttttacaagtcttgccatcatgagttgacgtgctattggactctaagagaacttaaggggcagtctaggccacaaggacttcaattattaggcaagtcttattccaagctgggctcagagccagtggaatgtggagggtggggagtatggggtctaccaagacagcagccagagcaactaagggagtgctcacaacaccactcccccaccccccacctagcagcagccacacaacacacagaaacctgtgaatttgggagagggagagcacagtgactggaggactttacatcaaactcagtgctgctatgtcagtaaagacctggcagaattcatcacctgctgactaaagaacccctgtacccagaataaaaaacagtgacaaccaggtaatacaccatgggcattgggatctgagaagtgctaagttcaggtgtgacccagtacatttctagctgtggtagctatggtgaaagacttctgtttgagaaaggcaggggggaaagtaaagggaactctacattgcacctggtataccagctcaaccacagtggggtagatcaccaagcagattcttagagtccttgagtccaggcctagggtcttcttggtcagcatttctgcacttgccctgggccaaaggtcgagtcccaggcattgcagaatttatcacaagctaactaaagagtccttgggctttaagtgagaaagtgatgatgatttggtggaaaccccccatgggccagtagtgtgggcagtcatagaagaagctcttctgcctgcagagaggggaaagaagagtagaaaatactttgtcttattccctaagtgccaggttagctacaataaaatagaagagcagctaaattttgaagattctatgctttaatctctggctcccaggtagcatctgtggacccactcatggctaggggaactttcaaccctataggcagagacacaaacctggctggcattgccaactattaatcacagagtcctggggctttgaataaacttatatggtagccaagtagtggttgcagtgggccttgggtgagaccaagttctgtgcctacttcaggtgtgagccagcacagtctcagtggtggctgccacaggagttcttctgttaccccaaccccagctccacatgtctcagcacagaaagagagactgctgatttgagagaaagtaagggaagagaacaagagtctctacttgataaatcaagagaatttttcttgatgttaatccaaggccaccaaggcactacctctacgtgtttgcataaactactgtgctattgggtttgggacccaagtttctttgaatacctggaaagtgttcccaaagataatgggcactagcaagcccagactgtgaagactacaataaagattgaattcttcaatgcccagatacagatgaatatctacaagtatcaaggccatccaggaaaacatgacctcaccaaacaagctaaataaagtaccagggacaaatcctggaaaaacaaagatatgtgacctttcatacaggaaatccaaaataactggttgaggtaattcaaagaaatgtacaatgtaacacagagaaggaattcaaaattctatcagataaatttaacaatgagattgaaataaaaagaataaagtagaaattctgaggttaaaatgctattgtcatactgaagaatggatcagaattacttaaaagaattgaccatggagaagatagatttagtgaacttgaagccagactatttaaaaatacaaagtcagaggagacaaaaaggaataaaaaataaagcatgcctatagaattttaaaaatagcctcaaaatagcaaatctaagagttattggccttaaagaggaggtagaaaaagagatgagttgaatatttatttaaataaataatattaaataatattaaacaattcctcaacatttgatatcaacattcgggtaacagaaagttacagaatataaagcagatttaacccaaagaagaccacctcaaggcactaaactgaactcccaaaggttaaggataaagaaatgattctaaaagcatcgagagaagagaaacaaataacattcagcggaactccaatacatctgacagcagacttttcaggggaaaatttacaggctgtgagattggcatgacatattaaaaaactgaaggaaaaaaagacttttactttagaataatgtatctggcaaaaacgtcctttaaacttgacggaaaaataagaactttttccaacaaacaaaaactgagggatttcattaacaccagacctgtcctacaagaaatgcttaagggatatcttaatctaaaagaaaacaagttagtgagcaataagaaatcatctgaaggtacacaactcactagcaatagcacatggaaaaacactgaatattataatatggtaattatggggtgcaaaaatctcaaatagaaagagtaaacaataaaccaataaaaataataactacaatgtatttatttccaatacatagactgtaaaatagggaatgaagagaaacaacaaaaagttgaaaagaatggcagtatagagtttttattagttgttttgcttgtttcttt

SEQ ID NO: 4802 - DNA, 3020 bp, Homo sapiens
  source 1..3020: mol_type = other DNA
aaagctgaaataattaacaggattgaaaggataaacccacagttctatagtcacagttggacacttcaatacctcattttaattaatggatagaaaaaccagacagaagcttcatgagaaatacaagagttaaacaacggtataagccactgagagctaatacgcatatacaggacagtccatccaacaacagcagaatatacattcctttcaagtgtatatggaagttctctaggatgggccatatcttcgtccacaaaatatgtcctaatcatttttaaaagtttgaaatcatacaaaatataatttacaaccacaatggaagaaacaacagataaataagtgaaaactggaaaattcacgaaaatgtggaaattaaacaatacagtcttcaactaccagtgagtgaaaaaaataaatcacaagcaaaattataaaatatcttgagataaattaaaataaaaacaaaacataccaaaacttattgaatgcagtgaaagtagagttcaaaggaaaatgtatggatataaacaactacatttaagaaaaatctgaaatcaacatcctcactctatacctaaaggcagtggaagaagacaaaataagactaaatccaaagctagcagtatgaaagaaataatagagagcataattagagcataaatcaataaaatagaagtttggagagcagtagaatgaataaacatagattatttgaaagatcaagcctttcactatattgactgagcaaaagatggaagactaattattaaaataataaatgaaagcagagccattactaccaactttacagaaatacaaaaggattacaggagtatactgtgaacaactgtctaacaacaaattagctgccctggatgaaatggacgaatcactagaaagacacaaactaccaaagtggctcaagaagaaagagaaaatctgaatagacctataacctaggagattgaattagtaatcgaaagtgattaacaaagaaacatttatgaccaaatagctgcattaactggtgagtcaacctaacatttaaagaagaattaataccatttcttctcaaactcttctgacataatatatgaagaaggaatacttgctaattcattttttgataacagcattatccttataccaaagccaaagagagcacaaaaagagaactacagcacaatatcccttatgaatatataagcaaaaatctcagcaaaatactagcaatactagcaaaatactagcagcaatactgtataatcaaaggattgtaaactatcaccctgtgagatttatccccaaaatgcaagggtggctcaacatataaaaaatcaatcagtgtaatatactctaacagtaaaatgaataagcacgtgattatttcaattgatgcagagaaaacattgatgaaatacaacacccttctataataaaaatactcaataaactaggcatagaagggattttctgcaacatgacaataggatgtacaaaaacccaacagttaatatcatgatcaatgatgaaacactgaaagctgttttcctaacatctagaacaagacaagcatggtgcatttgccacttgtgttcaatgtaccactggcaattttagccagagcaattaggcaagacaaagaaataaaaggcatctaaattagaaataaaaaacagaagtaaaattatatctacacatgatcttatgtgtataaagctccaaataaaacacaaaaccgattataactaataaaagaggcaggatgcaaaacaaacataggcaaatgagctatatttctatatagttgtaaagaactatgaaaatattttaaaaattccatttataatagcatcaaagaataagttattcaggcataaatctaaccatggtggtatacacaaaactttgctgaaaaaaacgaaagagagtggaaataaccggaaagacattctgtgttcacgggttgtaagacaatactgttaagatgacaataccatctaaagtaatctacagattcaatgcaataccatcaaaatcccaaaggcatttctgcagaaagaaagaaactcattctacaattcatacaaaaattcaaaggatctgacagacaaaacagtcttgaaaaagaatattagaaaactcacatttttcagtttcacagcctactacaaatctacagtaatcaagagagtgtggtactggcataagactaatagacttttagaccaatacaatagaacagatttaagatcctacaaattagcgctcacatatatggtcaatgactgttcaacaagctgtccaagtctagtcaagggaggaaagaacagtctcttcaacagctggatgtcagtgcacaagagagaagttagacccctaccttgcagtatacacgaaaattaattctaaattaataaaagacttacatgtaaggactaaagtatgtaactcttagaagaaaacacaaggtaaacctttatgacctttgagttttaagtgtattttgaaatatgacagaaaagcacagataacaaaagaaaatacacgtaaattagatttaatcaaaataaaaaacctttatgcatcaaaggatactatcaagggagtgaaaagacaacccatagtatgtgagaaaatatgtatctgataaaatcaaagtgcgtatctgataaaagcttaatatcccacaactcaacatcagaatttctaacatcccaattaaaaaataggcaaaggacttgaatagacatttctccgaagaagatacacaaatgtgtaagacggataagaaaagatgctaaacactgttattcattaataaaatgcaagacaaaacccaaatgagataccactttgcatccactagtaaggctttcataacaacgacacagaaaatcaatgttgctaaggaggtggagaaattggagccctcatgaactggctgctaggaatagaaaatgatgcacttgccgtggaaaacaatttggtggttcctcacagaaacacacagagaa

SEQ ID NO: 4803 - DNA, 225 bp, Homo sapiens
  source 1..225: mol_type = other DNA
aaatacttaataatcatattgctcctgctttctgacagcatccaatctaaagtcttcactttctgagatcctgtccgaaatcaaccaattaaagtccaaatcgtataatagtttctctctaactcctcccactgagatgacccatagtaccccattccttgctgcaatgtaattatatttacttacaagtgtgctcctggtggtctttaactgaagggcactgac

SEQ ID NO: 4804 - DNA, 38 bp, Homo sapiens; identical to SEQ ID NO: 4773
  source 1..38: mol_type = other DNA

SEQ ID NO: 4805 - DNA, 5298 bp, Homo sapiens
  source 1..5298: mol_type = other DNA
gggtctgaatgattgtccctcacataggattggtgaacactgctgctggggtctgaatgtttgtccctcacataggatcccagaacactgctgctggggtctatatgtatgtccgtcacgtgggattccaaaacactgctgctgggttctgactgtttctccctctcatagaattccatagcactgcgacgaggttctgaatgtttgtccgtaacataggattccagaaccccccgcctgttgtttaaatgtttgtccctcacattggattccagaacactgctgctggattctgaatgtttgtcactcacagaggattccagaacactgctactattgtctgaatgtttgtccctcacataggattctagaaccctcctaagagtgtgtgaatgtttgttcctcacatagatttccagatcactgctacgattgtctgaatgtttgtcctacacttaggattccagaacactgctatgacagtcgaatgattgtccctcacacagaattccagaacactgctacgagggtctgaatgattgtccctcacataggattcgaggacactgctgctggggtctgaatgtttttccctcacataggatcctagaacactgttgctggggtctacatgtgtgtctgtcacataggattccaaaacactgctgctgggttctgactgtttttccctgacatagaattcaagaacactgcgacgaggttctgaatgtttgtccgtaacataggattccagaacgccccctccccgtagcttaaatgtttgtccctcacattggattccagaacactgctacgatcgtctgaatgtttgtccttcacataggattccaaaacattgctacgggggtctgaatgtttgttcttcacataggattccagaacactcctgctgtgttctgaatgttagttcctcctataggattcacgaacactgtcacgaggttctgaatgtttgttccgcacataggaatccaaaacactcctgctgtgttccgagtgtttgtccctcacatgggattccagaacaatcctgccgtggtctgaatgtgagtccctcacataggtttctggaacactgctgctgggttctgtgtgtttctccctcacgtagaattccataacactgtgaagagattattaatggttgtccgtaacataggattccagaacaatctcggtgttgtttgaatgtttttcccttacataggtttccagaacactgctacgtttgtctgaatgtttgtccctcacataggattccagaacactgctgggagggtctgaatgtttttccctcacatgggattccagaacactgctatgattgtctgaatgtttgtccctcacttaggattccagaacacagccacgagggtctgaatgattgtccctcacatgggattacagaacaatcctgctgtgttctgaatgtttgcccctcacatatagttacagaacactgctgctgggttctgagtggttgtccatcacatgggattccagaacacacctatgagggtctgattgtttttctcttacaaaggattacagaacactgctgctggggtctaaaagtttctccatcacacactattccagagcattgctatgagggtctgaatgtttgtccctcatttagaattccacaacacttctgctggggtgtgaatgtttgtccctcacacaaaattccagaacactgctatgacgatctgaatgactgtccctcatttaggattccaaaacactcctgttgttttctgagtgtttgtccctcacctaggattccagaactatcctcctgttgtcagaatgtttgtctctcacatagggtttcagaacactgctgctgggttctgagtgtttctccctcacataggattccagaacactgctacaagggtctgaatgtttgaccctcacataggatcccagaacactgctgctagggtctagatttttgtccatcacaccggattccagaaccctcctaagagggtctgaatgtctgttcctcacagggaattccagaacactcctgctgtggtctcaatgtttttccctcacacagtactacagaacactgctacaggagtcagaatgtttgtccctcacgcagaattccagaacactggcacgagtgtctgaatgattggccctcacataggattccagaacactgtcgctggggtcgtaatgtttgtccctcacataggattccagaacactgcttttgggttctgagtgtttctcgctcacatagaattccagaacactgcgatgagggtctagaatgtttgtccataacataggattcctgaacaatcccgctgttgtttgaatgtttgtccctcacataggattacggaacactgctacgattgtctgaatgtttgtccctcacatagcattccagaacactgctacgactgtctgaacgtttattcctcacaggggattccagaacactcctgctatggcctggatgattgtccctcacataggattccagaacactgctatgagggtctgaaagtttgtgcttgacacagaattccagaacactgctacgagggtctgaatgactgtccctcacataggattccaaaacactgctgctggggtctacatgtatgtccgtcacataggattccagaacactgctattgggttctgactgtttctccctcacatagaattccagaacattgtgacgagcgtctgaatgtttgtccgcaacataggattccagaacactctcgctcttgtttgtatgtttgtccctcacataggattccagaacactgctgctggtgtccgaatgtttgtccctcacatatgattccagaacactgcttcgattgtctgaatgtcggtccctcacataggaatctaaaacgttgctatgtgggtctgaacgtttgttcctcacatagaattccataacactgctgctattgtctgaatgtttgtaccttacataggattccagaactctgcttcgaggatctgaatgtttgttcctcacataggatttcagaaccctgctgctgtggtctaaatctttgtccatcacataggattccagaacactgctaggagggtctgaatgtttttcccacagtggggattccagaactgtgtggtctgaatgtttgtccttcatacaggattcccaaacactgctatgagggaatgaatgtttgtccctcacaaaggattccagaaaattgctacgattgtctcagtgtttgcccccacataggattctggaacacagctacgagggtttgattgtttggccctcacgtaggattccaaaacattcctatggttttctgagggtttctccctcacataggattgcagaacaatcctgccgtgttctgaatgtttgtccctcatacagagttccagaacactgctgcttggttctgaatgtttgtccctcacataggattccagaacactgcttcgagggtctgaatgtttgttcctcacataggattccagaacattgctgctggggtctaaatgtttgtccctcacataggattccagaacactggtatgggggtctgaatgttggatcctcacaggggattccagaatactcctgctgtggtctgaatgtttgtcaatcacatgggattccagaacactgctacgagggtctgaatgtttgtccctcacataggatactaaaacactcctgcagtattctgagagttcgttcctcacatagaattccagagcatacctgctttggcctgaatctttgtcccttacataattttccagaacaccgctgcttgtttctgagagttggtctctcagataggataccagaacactgctacgagggtctcaatgtttgtccctcacattgcattccagagcactgctggcgtctaaatgtttgtccatcacataggatttcagaacactgttaggggtctgaatgtctgttcctcacaggagattccagaacactcctgctgtggtctgaatgattgtccctcacataggattccagaacactgctatgggggtctgaatgtttatccctcatgaagaattccaggacactgctacgacgatctgaatgtttgtccctcacataggattccaaaacactcctgctgttttctgagtgtatatccctcacatcggagtccagaacaatcctgctgttgtctgaatgtttgtccctcacatagggttcctgaatgctgctgctggtttccgagtgtttgtccttctcataggattccagacaattcgacgaaggtctgaatatttgtccctcacatgggattccagaacactgctgctggggtctacatgtatgtccatcatataggattccagaaaactgctgctgggttctgagtgttcctccctcacgtacaattccagaacactgcaatgagcgtctgaatgtttgtccataacataggattccagaacactcccgctgttgattcaatgtttttcccttacataggattccagaaaactgctaggattgtctgaatgtgtgtccctcacataggattccagaacactgctacgagggtctgaatatttgtccttaacgtaggattgcagaacacttgtgttggggtctgaatgtttgtccctcacataggattccagaaaactgctacgattgtctgaatgtgtgtccctcacataggattccagaacactgctacgagggtctgcatatttgtccttaaagtaggattgcagaacactgttataattgtcggaaagtttgtccctcacataggattccagaacacttctacgagggtctgaatgtttgtccctcacataggattgcaaaacactgaagctgtgttccgagtgtttgtccctcatatagggacccagaaaaatgctgctgggttctgagtgtttgtccctcacacaggattccagaacactgctactagtgtctgaatgtttgtccctcacataacactccagaacactgctgctggggtctcaatgtttgtcagtcacacaggattccagaacactgctacgatagcctgaatgtttgttcttcagaggggattccagaatactcctgctgtggtctgaatgcttgttcctcacacaggactccagaacactgctacgagggtctgaatgattgtctctcacataggattgcaaaatagtccagctgtcttctgagtgtttgtccatcacataggattccagaacactcctgctgtggtctgaaagtttgtccctcacacagaa

SEQ ID NO: 4806 - DNA, 259 bp, Homo sapiens
  source 1..259: mol_type = other DNA
taatccaagtactttggggggtcgaggtgagaggatagcatgtggccagaagttcaagaccagcctgggcaacatagcgagactccatctccacaaaaaaatgttaaaaattagccagacatggtggtgcatgtcttagttctaactactcaggaggctgagaaaggaagattactttagcccaggagctcaaaggtgcagtgagctgtgactgcactccagcccatctaaaaaaaaaaaaaaaaggaaagaaaagaaa

SEQ ID NO: 4807 - DNA, 173 bp, Homo sapiens; identical to SEQ ID NO: 4777
  source 1..173: mol_type = other DNA

SEQ ID NO: 4808 - DNA, 1260 bp, Homo sapiens
  source 1..1260: mol_type = other DNA
gccaccgttgctgggggatgggtccctgagacttggcgaagtaggagtactggactcgcgcaaaggccctgtctcgcaggttttcaggtgggcttggcgtttcctccgctttgaggggcaggtctccagtggccccccaggcgcaggcctggacatcactgtccgtctcgtcgtcgccccctacggcctcagagacacaggctcactgcatgtgctcttgggggacgtcagtgccacgtgtggtcacactggctccggctcggactagcctctgtctctctttgcccgtgtcgccggaagccgcgtcgagatgccggagcccccgggccttggagatgaaggcaggcccctgctccacccaggaaggagggaggcagtgggctcgtgggtcagtgcctttgcaggcgacagcacgccttgcggccctggggatgtttctgtgccccggcgagagcctttccgcctcactgcattgtaaccccattcccgatcaccgggtgggatccatcatcggatcccaagaggagtccgcgcagcccagccgacaccccgaagctcctccttcaccgggaacccaagcagaagaccgatcacggaggtcctgacgacaggactcctatgggtccgaccctgggtctcccgcaggcccctctggtagtcctcttcccacccgccgcctggggctgcgccgcagccgccgccgcaacctccagcaccgccgccccagtccccgcagccgccgcgttgccgccattttttaaagggtccgcagcctgactctgccgagtaagggggggtgggggcgggtgagtcggcctcgccagtgcgcatgcgcgaggccggagccgccgctttggtcacagtgaccgccaccattgcccggggatgggtccctgagacttggcgaagtaggagccctgtgtgatcgtgcgtcagagtcggggctgagaccagccctggccagggcagttaccaggacggtctccggaggccgagattcgcggagggtccaccagtaggaagaaaccccaggaggaagaaacctcagacagatcgccggggaggcagcgcgggatcccagcctcaggcgtgcgcggacggtgtgcgggtgaatctccccaaaagtggcgcccttgtgatgtcgaggacaggtctccctgtgtgcccgtgggctgctgtctcaccggtggctcgtcgtcgcggagagcagaacccggcagcttcaggggctgcctgggggtgggtgttacctgctgtatg

SEQ ID NO: 4809 - DNA, 2169 bp, Homo sapiens
  source 1..2169: mol_type = other DNA
tccaatatggccaaataggaagagctctggtctgcagctcctagtgtgatcaatgcaagatgggtgatttctgcatttccaactgagctacctgattcatctcattgggactgattggacagtgagttcatcccatggagggtgagctgaagcagggcagggcatcaactcacccaggaagtgcaaggggttgggggattttcctttcctagccaagggaaggcatgacagactgtacctggaaaaacaggacactcttgcccaaatactgcacttttcgcacagtcttagcaactggcagaccaggagattctctcctgtgcctgattcattgggtcctacacccatagagccttgcttactgccagtgcagcggtctgagattaaccttcatgctgcagctgagcagatggaggtgaatccacaatttttgaggtttgagtaggtaaacaaagtggccaggaagcttgaacagggtagagtcactcacagctcagcaaggcctactgcctttataaactccacctctgcgggcagggcatagctgaataaaaggcagcagaaacttctgcagacttaaacctcccatctgacagctctgaagagagcagtggttctcctggcatggtgtttgtgctctgagaatggacatactgcctcctcaaatgggtccctgaaccccgtgtagcctaactgggagacacctcatagtaagggccaacagacacctcatacaggtgggagaccctcttcaacgaagcttccagggaaggatcaagcagcaatatttgctgttctgcagccttctctgttgatacccaggcaaacagggtctggagtggacctccagcaaactccaacagacctgcagctgagggacctgactgttagaaggaaaactaacaaacagaaaggaatagcatcaacataaacaaaaaggacatccacaccaaaaccccatctgtaagttaccaacatcagataccaaaggtagataaaaccacaaagatgggaagaaaccagagcagaaaagctgaaaatcctaaaaaccagagcacctcttttcttccaaaggattgcagctcctcaccagcaatggaacaaagctggagggagagtgactttgacgagttgacagaaggaggcttcagaaggctggtaataacaaacttctccaagctaaaagagcatgtttgagcacatcgcaaggaagctaaaaaccttgaaaaaaggtcagacaatggctaactagaataaacagtgtagagaataccttaaatgaccttatggagctgataaccatggtacaagaactttgtgacacatgcacaagcttcaatagctgactcactccagtggaagaaaggatatcagtgatcgaagatcaaattaataaaataaagtgagaagacaagtttagagtaaaaagagtgaaaagaaatgaacaaagcctccaggaaaaatgggactatgtgaaaagaccaaatctacgtttgcttggtgtacctaaatgtgacagagagaatggaaccaagttggaaaacactccttaggatgttattcaggagaattttcccaatgtagcaaggcaggccagcattcaaattcaggaaatacagacaacaccacaaagttacttctggataagagcaaccccaagatactaattttcagattcaccagggttgaaatgaaggaaaaaatgttaagggcagccagagagaaaggtcgggttacccacaaggggaaacccatcagactaacagcagatctctcaacagaaaccctagaagccagaagagagtgggggtcaatattcaacattcttaaagataagaattttcagcccagaatttcatatccagctaaactaagcttcataagtgagggagaaataaaatcctttacagacaagcaaatgctgagagattttgagaccacctggcctgccttaaaagatctcttgaaggaagcactaagcatggaaaggaactaccggtaccagccactgcaaaaaatatgccaaattttaaagaccatcaatactatgaagaagctgcatcaataaacaggaaaaacagtgagctaacataacaatgacaggatcaagttcaccataacagtattgaccttaaatgtaaatggccaacaaagatcaaaagacacaaa

SEQ ID NO: 4810 - DNA, 1869 bp, Homo sapiens
  source 1..1869: mol_type = other DNA
agccctgacttctgaatagcacttctggacccagccagggactgagggatctcactgccctaaaggaaagaacacaggcctgtctggctttgccacctgctaattgtagagaccaaaggccttgagtgaacatagggagtcgtcagaaagtgcatgcagcaggacttgagcaagacccgtgctgtgctagcttcaggtctgatccagggcagtcatagtggtggtggcctgaggtgcttgtgtctttcttctcccagctttaggtggcttagaacagagagaaagactgtatctttgagagaaaataagggtagggaaagagtctgtagctagtaatccagaaaattctcctgggtcttgttgaaggctgtcaaggtggtacttctctgagtctggaagaattacagcattattgggtataaggtgctccataaagcagatatggcttagatcacaacacccaactcttttcaaatatgtgaaaagccttcccaagaaagacagctacaaataatcccagacagtgaagactacaataaatactcaccttttctctctttaaattttattttttaaacctctcatatggtgttgcatgcccaagattttaatgtccagacactgaagaacatctactagcatcaactccatccaggaaaacatgacctcaccaagtgaactaaataaggcactggggacaaatcctggagaaaaagagatatgtgatgtttcagacagagaattcaaaatagctgtatttaaaaaaaaactgaaagaaatttaagataacaaagtaaggaaattccaaattttatcagctaaactcaacaaatagattgaaatagttacagtaaattaagcagaaattctgagctgaaaaatgcaattggcatgctgaagaatgcattagagccatgtaatagcagaatggatcaagcagaagaaatagtgagcttgaagacaggctctttgaaaatacatagaagagacaaaagaaaaagaataaaaacaacaaatcatgccgacaggatctagaaaatagcctcacaaagacagatctaagagttatttgttttaaagaagatgtaaagaaagaggcaggggaggatctagaaaatagcctcacaaagacagatctaagagttattggttttaaagaagatgtagagaaagaggcaggggtagaaaaatttattcaaagggataataacagagaactttccaaacctagagaaagacagccatatccaactacaaaaatgttatagaacattaagcagatttaacccaaaaaagactacttcaaagcattcaatagtcttccaaaagtcaaagataaaagttcttaaggaagaaagagaaaagaaacaaataacctactggggagctccaacacgtctggcagcagactttacagtggaaactctactggccaggacagagaagcaataaatatttaaagtactaaaggaaagaaacttttaccttagaatagaatgtacagtgaaaatgttcttcaaaaaaaagaagaaatactgactttttcagacaaacaaaagctgaagtattttatgaataccatacctgtcctaaaggaatgctaaagggagtacttcagtcaggaagaaaaggacattaatgagtaataaatgatcacctaaaggtaaaaaaaaatcctcactgctaataggatacaaaacaaaacagaatattataacactatagctgtgtggtgtgcaaactactcttatttaaagtaggaatactaaataatatccaatcaaaagtaatagctacaacaacatttcaagacatagcacaataaaatataaatagaaacaacaaaaagttaaaaagttaagggatgaa

SEQ ID NO: 4811 - DNA, 401 bp, Homo sapiens
  source 1..401: mol_type = other DNA
taactgggaggcaccctccagcaggtgcacactgacacctcccactgcagggtactccaacagacctacagctgagggtcctgtctgttagaaggaaaactaacaaacagaaaggacatccacacaccaaaaacccatctgtacatcatcaccatcatcaaagaccaaaagtagataaaaccacaaagatggggaaaaaacagaacagaaaaactggaaactctaaaaatcagagcgcctctcctcctccagaggaacgcagctgctcaccagcaacggaacaaagctggacggagaatgactttgaagagctgagagaaggcttcagacgatcaaattactctgagctacgggaggacattcaaaccaaaggcaaagaagttgaaaactttgaaaaaaat

SEQ ID NO: 4812 - DNA, 4152 bp, Homo sapiens
  source 1..4152: mol_type = other DNA
tccagaacactgctacgattgtctgaatgtttgttcctcaaataggattctagaatgctcctgctgtggtctgaatgtttgtccctcacataggattcctgaacactgctatgaggttctgagtgtttatacctcagataggattccaaaatactcttgctattttctgagagtttgtccctcccataggattccagaacattgctgctggggtctgaatgtttgtccctcacataggattccagaacactgctaggattgtctgaatgtttgtgtctcacatggaattccataacactgctattagggtctgaaagtttgtccttcacagaggtttccaggaaactgctacaattatctgaatgtccgttacgtaggattccagaacactgctatgagggtctgaatgtttgtctcttacataggattccagaacactgcagatttggtctgaatgtttatcactcacacaggaatccagaacactgctatgatggtctgaatgttcattcctcacataggattccagaacacagctacaaccgtcttaatgtttgtccctcacaggggattccagaacactcctgctgcagtctgaatgtttctaactcacacaggattccagaacactgctacgagggtctgaatgtttgtccctcacacttaatagcagaacactgatacaagggtctgaataattgtccctagcaaaggattccagagcactgttactgtggtctgaatgtttgtccctcacataggattccagaacactgctgctgggttctgaatgtatctccctcacctagaattccagaacgttgagacgaggttctgaatgtttgtccataacataggattccagaacactgctacaattgtctcaatgtttctcactcacatggcataccagaacactgcggcgagggtctgaatgttttccctcatatacgattccagaacactcatgctgtggtctgaatgtttgtcccttgcataggattcctgaacaatgctgcgagagtctgaatgtttatccctcacataggattccaaaacactcctgctgtagtctcaatgtttgcccctcacataggattccagaacaatcctgctgtggtctgaatgtttgtccctcacatagggctccagaacactcctgctgggttctaagcgtttctccctcaccttaaattcctcaacactgtgatgagggtctgaatgtttgtccataaaataggattcctgaacactcccgctgttgtttgaatgtttgttcctcccttaggactccagaaaactgctgctgggttctgaatggttgtccctcacacaggtttccagaacactgttacgagggtctgaatgtccctcacataggattccagaacactgttgagaagttctaaatgtttgtctgtcatataggattccagagaacagctacgagggtctgaatgtttgttcctcacagaggattccagaagagtcctgctttggtgtgaatgtttgtgcctcacacaggaattcagaacacggctatgaggttgtgaatgtttgtccctcacacacaattccagaatgctgctatgagggtctgaatgattgtccctcacataggattccagaacactgctgctgggttgcgagtgtgtctccctcacatagaattccagaacactgcgaagaagttctgaatatttgtccataacataggattccagaacactcctgcagttgtttgaatttttgtccctcccataggattccagaacactactgctggggtgtgagtgtatgtccctcacttaggattccagaacactgcaaagattctcttaaagattgtccctcacataggtttccggaacactgctatgagagtctgaatgtttgtccctcacacaggattccataatactcctgctgtgttctgaatatttgtacgtcacataggattcctgaacactactacgagattctgaatgtttgttgctcacataggattccaaaatgtccctgctgtgttctgagtgtttgtccctcacatagggtcactgctgctgggttctcagtgtttctcactcacatagaattccagaacactgcaaagaggttctgaatgtttttctgtaacatagtattccagaacactctcgctgttttttgaatgtttgtccctcacataggattccagaacacttctgctggtgtctgaaagtttgtccctcacacaggattccagaacactgctacgagggtctgaatgtttttccctcacaaagggttccagaacaaagctgttggagtcataatgtttgtctgtcacacaggattctagaacactgctacgaggttatgaatgtttgttcctcaaagggtttttcagaacactcctgttgttgtctgaatgtgtgtccctcacacaggattccagaacactgctacgaggttctgaatgtttctcccttacatagaattccagaacactgctaccaatgtctgaatgtttgtctctcacataggattccagaacactgctacgattgtctgaaagtttgtcgctcacataggattccagaacactgctacgattgtctgaaagtttgtccctcacataggattccagaacgctgctatgagggtctgaatgtttgtccctcatgcagagtaccagaacactgcttcgagggtctgaatgattgtccctcacataggattccagaacacggctgctggggtctcaatgtttgtgccacacataggattccagaatacggctgctggggtccacttgtaagtccgtcacaatggattccagaacacagctgctgggttctgagtgtttctccctcacttggaatttcagaacactgatatgagggtctgaaagtttttctgttacttaggactccagggctttccctctgttgtttgaatgtttgtccctcacagaggattccagaaaaatgctacgattgtatgaatgtttgtcccccacatatgattaaagaacactgcgaagagggtctgaatgtttgtctgaaacataggtttcccaaacagtttcgctgttgtttgactgtttttccctcacataggattccagaaaaatgctacgattgtatgaatgctggtccctcacataggattccagaacagtgctacgagggtctgaatatttgtccctcacatgggattccagaacacttctgctgtgttctgaatgtttggccctcagaaaggattcctgaactctgctacgacagtatgaatgtttgtccctcacatcagattccaaaacactcctactgtgttctgagtgtttgtccctcacatagaattctagaacagtcctgctattgtctgaatgtttgtcacacacacagggttgctgataactgctgctgagttctgaatgtttctccctaacatagaactctagaacactgtgacgaggttcggaatgtttgtcggtaacataggattcaaaaacactcatgctgttgtttgaatgtttgtccctcaagtaggattccagaacactgcttctggggactacatgtatgtctgtcacataggattccagaacactgctgttgggttctgtgtgtttctccctcacatagaattccagaacactgcgatgagggtatgaatgttgttcataacataggactccagaaaactcacgctcttctttgaatgtttgtccctcacgttggattccagaacactgctgctggggtctcaaagtttgtccctaacataggattccagaacactgctacgattgtctgaatattttgccttcacataatattccagaacactgctacgagggtctgaatgtttgtccctcaaataggattccagaatgctgctgctgggttctaaatgtttgtcggtcacataggattccagaacactgctgctggggtctgaatgtttgtccctcacatattattccagaacactgctgggttctaaatgtttgttggtcacatcagattccagaacactgctgctggggtgtgaatgtttatccctcacataggattccagaacacagttgctggggtctacatgtatgccagtcacatgggattccagaacactgctgctgggttcacagtgtttctccctcacata

SEQ ID NO: 4813 - DNA, 4752 bp, Homo sapiens
  source 1..4752: mol_type = other DNA
ctgaatgtttgaccataacataggattccagaacattcccgctcttgtttgaatgtttgtccctcacatagcattgcagaacactgctgctggggtctgaatgtttgtctctcacataggattccagtacactgctacgattgtcagaatgtttatccctcacctaggattacagaacactgctatgatgctctgaaagtttgtccctcacataggattccagaacactgctgctgaggtataaatgtttgtccatcacatgggattccagaacaaagctacgagtgtctgaatgttcctcacagcagattccataacactcctgctgtggtctcaatgtgtgtccctcacaaaggatttcagaacacggctaagagggtatgaatgtttgtccctcatacagaattccagaacactgctacgagggtctgaatgctggtccctcacataggacaccagaacactgctacggttgtctgaatgtttgtcccttccataggattcctgaacactgcttcgagggtctgaatgtttgtccctcacattgcattccaaaacactcctgttgtgttctgtgagtttgaccctcacataggattccagaacaatcctgctgtggtgtgaatgcttgtccctcacatatggttccagaacactgttgctgggttctgagtgtttgtccctcacaagggattccagaacactgctacgagggtgtgaatgtttgtcccacacaaaggattccagaacactgctactggggtctaaatgtttgtccgtcacatagcattcctgaacaatgttacaagaatctgaatgtttgtacctcacataggattcctgaaccactgctacgagggtctgaatgtttgtccctcacatagaattccaaaatactcctgctgtgttctgagtgtttgtccctcacatagcattccagaacactgcagctagggtctaaatgtccgtcacataggattctggaaaactactatgaggttctgaatgtttgtctctcacacagaattccagaacactgctacgagtttctgaatgacagtccctcacataggattccagaatactgctgctggggtctgaatgcttgtccctcacataggattccagaactctgctgctggggtgtacatgtatgtccgtcacataggattccagaacactgctgctgggttctgagtgtttctcactcgcataggattccagaacactgctacaagtgtctgaatgtttgtctgtcacattggattccaaaacactcctgctgtgttctgagtgtttgttcctcacataagattgcagaacactcctgctgtggccggaaagtttgtccctcacataagattccagaacactgctgctggaatctgaatatttgtccctcaagtaggtttctagaacaatgctactattgtttgaatgtttgtccctcacatgggattccagaacgctcctgctgtggtctgaaagtttgtccctcacataggattcctgaacactgctacgagtgcctgcatgtttgtccctcacatcagattccaatacattcctgctgtgttctgagtatttctccctcacatatgattctagagcaatcctgctgtgatctgaatgtttgtccctcacatagggatccagaacactgttgctgggttcttaatgtttctccctaaagtagaactccagaacactgcctcgagggtgtgaatgcttgtccgtaacacaggattccagaacactctaactgttgtttgaatgtttgtccctcaaataggattccagaacagtgctgctggggtctacatgcatgtccgtcagagaggataccagaacactgatgctcggttctgagtgtttctccctcacatcgaattctagcacactgtgaccagtttctgaatgtttttctgtaacatgggattctagaacactcccgctgttatttgaatgtttgtccctcacataggattccagaacactgctatgagtgtctgaatgtttgtccctcacttaagattccagaacactgctatgagggtctgaatgtttttccctcacataggaatccagaacaccgttacgagggtcggattgttcgttcctctcaggggattcctgaacactcctgctgtggtctgaatgattgtctgtcaaacaggattccaggacactgctacgagggtctgaatgtttgtccctcacacagaattccagaacactgctacgtgggtctgaatgattgtccctcacgtaggattccagaacactgccatgagggtcttaatgtttgctcctcacttaggactccagaacattcctgctgtggtctgaatgtttctcccccacataggattcctgaacactgctatgagggtctggatgtttgtccctcacataggattccaaaacattcctgctgtgttccgagtgtttgtccctcacatacgattccagaacaatcctgctgtggtccgaatgtttgtccctcacatgcggttccagagcacagctgctgggttctgagtgtttctccctcacatagaattccagaacactgcgacgagtttctgaacgtttgtccataacattggattccaaaacactcttgctgttgtttgaatgtttgtccgtcacacaggattccagaatactgctgctggggtctgaatgtttgtcccttacgaaagattctagaacactgctatgattgtctgaatgtttgtctctaatacagggtcccagaacactgtgacgagtgtctgaatgtttgtccataatataggtttccagaacacagctgctgttgtttgtttttccctcacaggattccagaacaatactgcaattgtatgagcgtttgtccctcacattggattccagaacactgcttcgaggttctgaatgtttgtccctcacactgaattacagaacacagctggtggggtggaaatgtttgtccgtcacataggattccaggacagtgccacgagggtctgaaagtttgttcctcacaggggattccagatcactcccgatgtgtctgaatgtttgtccctcacacaggattgcataacactgctatgatggtctgaatgattgtcactcaagcagaattccagaacactgctactaggtctgaatgactttccctcacataggattccagaacattgctgctggtttctgaatgtttgtccttcacataagattccagaacactgctgctggtgtctacatgtatgtctgtcacatagaattccagaacactgctgctgggttctgagcatttctccctcatgcagaattccagaacactacaacgaggttctgaatgtttgcccataacacaggattccagaacactcccgctgttgtttgaatgtttgtcactcacataggattccagaacactaacacgagggtctgaatgtttgttcctcacataggattccagaacactgctacaagggtttgaatgtttgttcttcgttggggattccagaacactcctgctctggtatgaatgtttatccctcacatagaattccagaacactgctatgagggtctgaattttttgtccctcacacagaattccccaacactgctatgagggtctgaataattgccctaccatagggttccagaacactgctgctggggtccaaattattgtccctcagataggattccagaacatgctgatggggtctacatgtattgccgtcacataggattccagaacactgctgctagattctgcattttgctccctcacatagaattccagaagagtgcgacgagggtctgaatgttttttcatatcataggattccagaacactcctgctgttgtttgaatgtttgttcctcacacaggattccacaacacagctaaaaatgtctgaaagtttgtccctcagataggattccagaacactgcggctgtggtctgaatgtttgtccctcacataggattccagaacactgctatgattgtctgaatgtttgtccctcacatagcattccagaccactgctacaagggtctaaaggcttgttcctcacaaaggattccagagcacacctgctgtggtctgattgtttgttcctcacataggattcctgaacactgctgctagggtctgaatgttggccttcacataggattccagaaccctgatacgattgtctgaatgtttgtccctcacacagcactacagaacactgctacgagggtctgaatgtttgttcctcacatgggattccagaacactgctatgattgtctgaatgtttgttcctcacataggtttccagaaaacttctgctatggtctgaaagtttatccctcacataggattccagaacactgctacgagggtctgaatgtttgtcccttcacataggattacagaacgctgctgctgttgtccaaacatctctctgtcacatagggttccagaacactgcaacatgtgtctgaatgttttccctcacataggattccagaacactctcattgttgtttgaatgtttgttcctcacataggattccagaacactgctgctggggtctgaatgattgttcctcacataggattccagaacactgctgctgggttctgagtgtttctccctcacgtagatttccagaaaacagggacgagggtctgaatgtttgtccataacagaggatttcaggacactctcgctgttgtttgaaagtttgtccctc

SEQ ID NO: 4814 - DNA, 2235 bp, Homo sapiens
  source 1..2235: mol_type = other DNA
tataggatctacacagaatgtgaagaaaaataaatgaaaccaaaccgctacaagaaataaccaaactaagaagacagcaagagagggaaaaaaaaaagaactgcaaaacatatgaaaaacaattaaccaaacgcaagttactccttacctatcaacaatgactttaaatgtgaaaggattaaactatctaattaaaagacatagagtggcacaatgcataaaagatactcatcagtacatatttataagggagtcactttagatataaagatacatagaggctcaaagtgaagggatgggaaaagatactgtacgcaaatggtaaacaaaaaagagcaagggtatctatatttagatcagaaaaaatagacttgaaataaaaaactgtcactagagactaagaatgtcattatataatgataaaagttcaatccaatgggaagattgaaaatatatatccacccaacattagaacacctaaatatataaagttaatatcaacaaagctaaggggagaaatcagtaacactaaaataatagtagccaacttcagtaccccaaattcaataatggatagaacatctaggagggaataaaaaaagcggaaacagctgacttgaacaacacagtagattaaacactgacagatacacaactttccatccaacagcagcagaatatacattcttctcaagtgcacacagaatcttctctgagatagatcaaatcttaggtcacaaggcatactacaaatttaagaagtttgatataatgccaagtatcttctcattccacaatggaataaaattagaagtcaataacaaagaaaacagaaacatttacaaaaatgcagaaactaaataacacatgcttaaacaaccattgggtaaaagaagaaatcaaaagggaattttaaaaatatcttgagacaaacaaaaatgaacatacaactcaacaaaacttacaggattcaataaaagaagtgctaagagggaaatgttacagtgataaatacctacattaaaaaataagaaagatctaactcgaacaacctaactttacaaataaacaattagaaaaagagaaactaactaaacccaaagttagcataatgaagtaaataataaagatgagaatataaataaaataactataaaatagaaaacaatagaaaaatcaacaaagttagagttgaatttttggaaatacaaacaaaaataacagacccttagctacactaagaaaaaaagagaaactcaagtaaatataatcagaaatgaaaatggagacattataggaaatgtacaggaatacaaatgattataaaggacaattaagcgattatatgccaataaattggataacctagaataaatggataaattcttagaaagatgcaatctaccaaaatggaacaaaaaagaaatagaacagaccaaaagcaagcaaagagatttaatcagtaatcaataatttcccaacaaagaaaagcccaggtgcagatgctttcatgggcaacttctaccaaacattcaaagaagaactaacaccaaaacttcttaaactcttcagaaaaaatagaagagagaatactctcaaactcatttcatgaggccgatgttaccatgacttaaaagctagacgaagacaacacaagaaaaaataattacagaccagtatccttaacgaatatagatgcaaaaattctcagtaaaatactaactagcaaactgaattcaaaagcacattgaaaaggtcatacaccatgaccaattgtaacttatctatgtgatacaaggatgtttcaatgtgtaaaaattaataatgtgatataccacattaacagaatgaaagataaaaataacattccaatggatgcagaaaacacatttgacaaaattcattatactttcatgataaaactctcaacaaaataagtatacaagaaacttacttcaacactgtaaaggctgtatatgaaaaacctatatctaatattataatcaatggggaaaaactgaaagctttttcttaatatctggaacaagacaaggatgtctactctcatcactcctattcaacatagtactggaaatcctagccagagcaatcaggcaagagaaataaaaggcatcaaaattgaaaggaaagatgtagttacctctgttaacagaaaacatgattattatacattgaaaactgtaaagactccacagaaaatggttacaaataata

SEQ ID NO: 4815 - DNA, 401 bp, Homo sapiens
  source 1..401: mol_type = other DNA
taactgggaggcaccctccagcaggtgcacactgacacctcacactgcagggtactccaacagacctacagctgagggtcctgtctgttagaaggaaaactaacaaacagaaaggacatccacacaccaaaaacccacctgtacatcatcaccatcatcaaagaccaaaagtagataaaaccacaaagatggggaaaaaacagaacagaaaaactggaaactctaaaaatcagagcgcctctcctcctccagaggaacgcagctgctcaccagcaacggaacaaagctggacggagaatgactttgaagagctgagagaaggcttcagacgatcaaattactctgagctacgggaggacattcaaaccaaaggcaaagaagttgaaaactttgaaaaaaat

SEQ ID NO: 4816 - DNA, 184 bp, Homo sapiens
  source 1..184: mol_type = other DNA
taacacgttcagatatgaggttggatacaaaacagacactaatttttaaacactgaatttaaacttctaagaacttactgctttgggccctatccatatgctcagattgggaacgggtcagtgggtgggatgatttcattctcttctgcctttagtggtatttcacctgggaagttgagaaaca

SEQ ID NO: 4817 - DNA, 264 bp, Homo sapiens
  source 1..264: mol_type = other DNA
gccgataatccaagtactttagggggtcgaggtgagaggatagcatgtggccagaagttcaagaccagcctgggcaacatagcgagactccatctccacaaaaaagtgttaaaaattagccagacatggtggtgcatgtcttagttctaactactcaggaggctgagaaaggaagattactttagcccaggagctcaaaggtgcagtgagctgtgactgcactccagcccgtctaaaaaaaaaaaaaaggaaaaaaaaaaagaa

SEQ ID NO: 4818 - DNA, 1292 bp, Homo sapiens
  source 1..1292: mol_type = other DNA
gtaaactggtatcagtagagtgggatgctgctgaaaagatacctgaaaatgcagaagcaattttggaactgcgtaacaggcaggggttggaacagtttgaagggctcagcagaagacaggaaaatgcaggaaagtttggaacttcctagagacgttttgaatggctttgaccaaaacgctgataatgatgtgaacaatgagatccaggctgatgtggtctcagatggagttgaggaacttgttagaaactagagcaaagttgactcttgttatgttttagcaaagagactggcagcattttgcccgtgccctaaagattagtgaaacttagaacttgacagaagaattagggtatctgacagaagaaatttctaaacagcaaagcgttgaagaagtgacttgggtgcttttaaaggcattcattttataaggcaagcagagcataaaagttcagaaaatttgcagcctgacaatgtgatagaagagaaaaacccgttttctgaggagaaatttaagctggctgcagaaatttgcataagtaacgaggaactgaatgtcaatccccaagacaatggtgaaaatgtctcctgggcatgtcagaagtcttcacagcagcccttcccatcacagtctcagaggcctagaataaaatggttttgctgggcccagggtccccatgctgtgtgcagttagggtgttggtgccctgcatcccagccactccagctgtgactaaaagggaccaaagtatagcttgagctgttgcttcatagggtggaagccccaagccttggcagcttccacgtggtgttgagcctgtggatgcacagaaatcaagaattgaggtttgggaacatctgcttagatttcagaagatatatggaaacacctggatgcccatgcaaaagtttgctgcagagatggggccctcattgataacctctgctagggcagtgaggaagggaaatgttgggtgggagcccccacacagagtccctactggggcaccgcctggtggacctgtgggaagagggccaccatcctccagacctcagaatgttagatccaccaacaacaccatgtgcctgggaaagccacagacactcaacaccagcccacaaaagcagccagaaggcaggctatatcccgcaaagccacaggggcagagctgcccaataccatgggaacccacctcttgcatctgcatgatcaggatgtgagacatggagtcaaaggagatcattttggagctttaagatttggctgcccctctggattttggacttgcatggg

SEQ ID NO: 4819 - DNA, 446 bp, Homo sapiens; identical to SEQ ID NO: 4776
  source 1..446: mol_type = other DNA

SEQ ID NO: 4820 - DNA, 173 bp, Homo sapiens; identical to SEQ ID NO: 4777
  source 1..173: mol_type = other DNA

SEQ ID NO: 4821 - DNA, 297 bp, Homo sapiens
  source 1..297: mol_type = other DNA
gtggctcatgcctgtaatcccagcattttgggaggccgagatgggcggatcacgaggtcaggaaattaagagcatcctgggcaacatgatgaaaccccgtatctactaaaaatacaaacattagctgggtgtggtggcatgtggctgtaatcccagctactcgggaggctgaggcaggacaatcgcttgaacccgggaggcagaggttgcagtgagctgagatggcactactgcactgcagcctggtacaaagctagactctgtctcaaaaaaaaaaaaaaaaagagagagaagaaa

SEQ ID NO: 4822 - DNA, 450 bp, Homo sapiens; identical to SEQ ID NO: 4780
  source 1..450: mol_type = other DNA

SEQ ID NO: 4823 - DNA, 1258 bp, Homo sapiens
  source 1..1258: mol_type = other DNA
gccaccgttgctgggggatgggtccctgagacttggcgaagtaggagtactggactcgtgcacaggccctgtctcgcaggttttcaggtgcgcttggcgtttcctccgctttgaggggcaggtctccagtggcccccgggcgcaggcctggacatcactgtccgtctcatcgtcgcccactacggcctcagagacacaggctcactgcatgtgctcttgggggacgtcagtgccacgtgtggtcacactggctccggctcggactagcctctgtctctctttgcccgtgtcgccggaagccgcgtcgagatgccggagcccccgggccttggagatgaaggcaggcccctgctccacccaggaaggagggaggcagtgggctcgtgggtcagtgcctttgcaggcgacagcacgccttgcggccctggggatctttctgtgccccggcgagagcctttccgcctcactgcattgtaaccccattcccgatcaccgggtgggatccatcatcggatcccaagaggagtccgcgcagcccagccgacaccccgaagctcctccttcaccgagaacccaagcagaagaccgatcaaggaggtcctgacgacaggactcctatgggtccgaccctgggtctcccgcaggcccctctggtagtcctcttcccacccgccgcccggggctgcgccgcagccgccgccgcaacctccagcaccgccgccccagtccccgcagccgccgcgtcgccgccattttttaaagggtccgcagcctgactctgccgagtaagggggggtggggcgggtgagtcggcctcgccagtgcgcatgcgcgaggcccgagccgccgctttggtcacagtgaccgccaccgtcgccgggggatgggtccctgagacttggcgaagtaggagccctgtgtgatcgtgcgtcagagtcggggctgagaccagccctggccagggcagttaccaggacggtctccggaggccgggattcgcggagggtccaccagcaggaagaaaccccaggaggaagaaacctcagacagatcgccggggaggcagcgcgggatcccagcctcaggcgtgcgcggacggtgtgcgggtgagtctccccaaaagtggcgcccttgtgatgtcgaggacaggtctccctgtgtgcccgtgggctgctgtctcaccggtggctcgtagtcgcggagaccagaacccggcagcttcaggggctgcctgggggtgggtgttacctgctgtatg

SEQ ID NO: 4824 - DNA, 4376 bp, Homo sapiens
  source 1..4376: mol_type = other DNA
agcgggcagaaatcccatgaggggcagttgaggtttgaggaaggcgaggtgaggcacctgtggcagaaaaaaaaaaaaaccgcaccacggagaagcagagcctgggtccccaacggacaaaagtgtcttcccatcagcccttgcgctgggcccaggtgaccctggcattcctggttcgagaccagggtgcgcttcaggccgctaggggtgcccaaaagcgggcagaaggcccatgaggggaaggtgatgcacctggggcagaggaaaaaaaaaaaaaaaaccgcgccgcctataagcggggcctggctcccccacagaagaaactgtcctcacatcagcgcttgcgctgcgccccagggaccctggtatccctggctcgagcccagcatgcgcctcggcctgctaggggtaccccaaggcagacagaaggcccatgagggaaaggtgagacacctggggcagagaaaaaaataaaaaaactgcgccgcccagaagtggggcctgggtcccccacagacgaacgtccctacccatcagccctgaactgggccccggagaccctagcgtccctggctcgaaaccagggtgcgcttcgggcccgctagtggtacctcaaggcgggcagaaagcccatgaggggaaggtgaggcacctggggaaaagcgaaaaaaacaaaaacaaaaacgtcgcagagaagcagagcctgggtccccgaggaagaaagtgtcttcgcatcagcccttgcgctgggccccggggaccctggtgtcccagtttcgaacccagggtgtgcgtctggccactaggggtaccccaagtcggacagaaggcccatgaggggaaggtgaggtttgagggaggagacgtgaggcaactgtggcaggaaaaaaaaaaaaaaaaaaacacgccgcggagaagcggggcctgggtccccaagggacgaaagtgccttcccatcagcccctgcgctgggccccatggacactggcgaccctggttagagcccagggtgcgcctcgtgcccaataggggtatcccaaagcgggcagaatgctcattaggggaaggtgagacacctggggcagagaaaaaaaaaaaccgcgccgcaaagaagcgggacctgggtcccccacggatgaaagtgtcttcccatcagcccctgccctgggctccatggaccctggcaaccctggttcgagccccaggtgcgcttcgcgcccgctagggttacccagaagccggcagaaagcccatgagaggaaggtaagacacctggggcaaaggaaaaaaaaaccgcgcttgcagaaaagcggggcctggctcctccacggacgaaggtgccttcccatcagcccctgcgctgggccctggggaacctggtgtccctggctggaaaccagggtgcaccttggacccgctaggggtaccccaaggagagcagaaagcccatgaggggaaggtgaggcacctgcggcagagaaagaagaaaaaccgcgcagcggagaagcggggcctgggtcccccactgacgaaagtgtctttccgtcagcccttgagctgggtcccgaggacgctgacatccctggttcgagcccacgctgcgcctcaggctgctacgagtaccccaaggaggaaagaaggcccaaaagtttcagctgaggtttgaggcaggagagatgaggcacctgtggcagaaaaaaaaaaaaaaacaaaaaaaaacaaaaaaacctcgcagcggagaactggtgcctgggtctcccagggacgaaagtgccttcccatcagccactgcgcttggccccatggaacctggcctccatggttcgagcccagggtgcgcctcgggccgctaggggtaccccaaagtgtgcagaaggcccatgaggggaaggtgaggcacctggggcagacaaaaaaaaaaaaaaaaacctcgccgcggagaagcggggactgggtccccccagcggacgaaagtgtcttcccatcagcccttgcgctgggccacagggaccctggcttccctggttcgagcccacagtgcacctcgggccgctaggtgtaccccaaggcagacagaaggcccatgaggggaaggtgaggtttgagggaggagcggtgaggcacctgtggcagaaaaaaaaacgcgccacggagaagcagggcatgggtcccccacggacgaaggtgccttcccatcaggccctgcgctgagccccgtggaccctggcgaccttggctcaaacccagggtgcgcctcgggccgttaggggtaccccgaggcgggcagaaagcccatgaggggaagttgaggtttgagggaggagaggtgaggcacctgtggcagacaaaaaaaaacaaaaaaaccgcaccgcagagaagcggggcctgggtccgccacggacgaaagtgtcttcccatcagcccttgcgctgcgccccggggaccctgacgaccctgattcgagccgagggtgcgcctcggtccactaggggtacctccaaatcaggcagatggctcatgaggggaaggtgaggtacctggggcagccaaaagaaaaaaaaaaaaactgcgccgcggagaagcggtgcctgggtcccccacggacgaaagtgtcttcctatcagcccttgcactgggccccgggaaccctggcgtccctggttcgaccccatggttcgcctcgggccactaggggtaccccaaggcgggcaaaaggcccatgaggcgaaggtgaggtttgagggaggagaggtgaggcacctatggcagaaaaaataaaaacgccacggagaaggggggcctgggtcccccacggacgaaagtgctttaccattagcccctgcgcttggccccgtgcaccctggcgaccctggttcgaacccagtgtgcgcctcgggccgctagccgtaccccaaagtgggcagaagcccatgaggggaaggtgaggcacctggggcggagaaaaaaggaaaaaacctcgccacggagaagggaggcctgggttccccacgaaagaaagtgccttcccatcagacccggtgctaggccccagggaccctggcatccctggttcgagcccagggtgcgcctcgggccgctgggggtaccccaaggcggacagaaagcccatgacgggaaggtgaggcacctgtggcaggaaaaaaaaaaaaccgcgccgcagtgaagctgggcctgtgtcccccactgacgaaagtgccttcccatcaggccttgcgctggacctcgcggacactggcgaccctggttcgagcccagggtgcgccttgggcccgctaggggtacccagaagcgggcagaaggcccatgaggggtaggtgaggcacctgaggcagagaaaaaaaaaaactgtgctgcggagaagcggggcctgggtcccccacggaagaaagtgtcttcccatcagcccctgagctgggcccaggggaccctggcatccctggttcaagaccagggtgcgcttcgggcctcttggggtaccccatggcgggcagaaagcctatgaggggaaggtgaggtttgagggaggagaggtatggcacctgtggcataaaagaaaaaaaaaaccgcgccacagagaagcagggcctgggtcccccaaggacgaaagtgccgtctcatccgcccttgtgctgggccccggggaccctgtcgtccctggctcgaatgcagggtgcgcctctggcctgctaggggtaacccaaagtgggcagaaggcccatgaggggaaagtgagtcacctggggcagagaaaaaaaaaaacaaaacacagtgctgcggagaagcggggcctgggtcccccacgggtgaaagtgtcttcccatcaacccttgcgctgggccccggggaccctggccacccttatttgagcccagcgtgtgcctggggccactaggggtaccccaaagcgggcagaagacccatgaggggaaggtgacccacctggggcagagggaaaaaaaacgcgccacggagaagcggggcctgggacccccacggaagaaagtgtctccccatcagcccttgcgctgtgccctggggaccctggcatccctggttcgagcccagggtgcgcctcgggccgccaggggtaccacaaggtggacagaaggcccatgaggggaaggtgaggcacctggggcagagaaaaaaaaaactgcgccgccgagaagtgaggactgggtcccccacggacgaaagtgtattcccatgaacccttgcgctgagccccagggaccctggcacccctggttcgagtccagtgtgtgcctagggcggctaggggtaccgcaagtcggacagaaggcccatgaggggaagtgaggtttcagggagtagaggtgaggcacctgtggcag

SEQ ID NO: 4825 - DNA, 184 bp, Homo sapiens
  source 1..184: mol_type = other DNA
ttaacacgttcagatatgaggttggatacaaaacagacactaatttttaaacactgaatttaaacttctaagaacttactgctttgggccctatccatatgctcagattgggaacgggtcagtgggtgggatgatttcattctcttctgcctttagtggtatttcacctgggaagttgagaaac

SEQ ID NO: 4826 - DNA, 310 bp, Homo sapiens
  source 1..310: mol_type = other DNA
ggccaggcgaggtggctcatgcctataatcccagcacttcgggaggccaaggcaggcggatcacgagctcaggagttcgagaccagcctggccaacatggtgaagccccgtctctaccaaagatacaaaaaattagcagggtgtggtggcgtgtgcctgtaatcccagctacttgggaggctgaggcaggagaatcgcttgaacctaggaggcagacgttgcagtgagctgagatcgggccattgcactccagcctcagcgatagggctagactccacctcaaaaaaaaaaaaaaaaaaaaaaaaaagaa

SEQ ID NO: 4827 - DNA, 2354 bp, Homo sapiens
  source 1..2354: mol_type = other DNA
aggcatacctagtttatattatgctttgctctaatgtgctttgcagatactgtattttttataaactgaaggtttggcaatcttgtgtcaagcaagtctatcagcacaatttttccaacaaaatgtggtcactttttgtctgtgtcacattttggtaacattactaatatttcaaactttttcaagattattatatctgttatgtgatctgtgatcagcgatctttgatgttactactataactattttggggtgtcacaaacacacccatataagatgataaactgaaccaataaatgttgtgtgtgttctgattgctccaccaaccagctcttcccccatctctctccctcaccccaggcctccctgttccctgagatacaacaatattgaaattaggccaagcaataatcctacaatgacctctaagtgttcaagtgaaaggaagagtcacaggtctctcactttaaatcaaaagctagaaatgattaagctaagtgaggaaggcatgtccaaaggtgagacaggctgaaagctaggcctcttgtgccagttagccaagttgtcaatgcaaaggaaagtttttgaaggaaattaaaagtggtaacccagtgaacacacaaatgataagcgaaacacagtcttactgctgatatggagaacgttttagtgctctggatagaaaagcagatcagccacaacattcccttaagccaaaacctaatccagactaaggctctaatgctctttaattctaagactgagagaggtgaggaagttggagaaaaagagtttggagttagcagagattggatcatgaggtttaaggaaagaagccatctctataacaaaactacaaagtgaagtagcaaatgctgatgtagaagctgcagcaaggtatccagaagacctagctaagatcactgatgaaggcagctatactgacaagagatttgcaatgtagatgaaatacccttctattgaaagatgccatctaggactttcatagctagagagaaatccatgcctagcttcaaagtttcaaaggacagtctgacttttggtaggggctaatatagctggtgactttaagttgaagccaaggctcatttaccattccaataatcttagggcccttaagaattatgctaagtctactctgcctgtatgttgacagcacatccgtttaaagaatggttaactgaatattttgatcccactgttgagacctgctgctcagaaaaaaaggattccttccaaaatattactgcgcattgactatgcacctagtcatgtgagagctctgattgagatgtacaaaaagattcatgttgctttcatgactgctaacacagcattcattctctagtccatggatcaagcagaaacttcaactttcaagtcttgttaagaaatacatttcataaggttatagctgccacagatagtgattcctctaatggatctgggcaaagtaaattgaaaaccttctgaaaagggttcaccattttagatgccattaagaacgtttgtgattcatgggaggaagtcaaaatatcaacatgaacaaaactttgagagaaggtgattccaaccctcatggatgactttgaggagttcaagacttcagtgtagtaagtcacggcaaatgtggtggaaattgcaagacaactagaattggaagtggggcgtgaagatgtgactgaattgcttacaatctcatgataaaacttggatgcatgaggagttgctttttatggatgaaccaaaaaacaaaaaaaagtggtttcctgagatagaatctacttctggtgaagatgctgtgaacattgttgaaatgacaacaaaggatttagagtatgacacaaacttagttgataaagcagcagcaaggtttaaaatgactccaatttcgaaataagttctactgtgggcaaaatgctgtcaaacagcatcacacactacagagaaatctttcatgaaaggaagagtcaaacttcattgcaatcttattttaggaaattgccacagccaccccaaccttcagcaaccaccactctgatcaatcagcagccaccaacactgaggcaagacccttcaccagcaaaagattgcaacttgctgaagggtcggatgatcgttagcattttttagcaacctagtattttaattaagatatgcacattttttttttagacataatgctgttgcacacttcttagactatagtgtaatgtaaaagtaacttttatatgtactgggaaacaaaaaaaaattgtgtggctcactttattgctatattcactttattgcagtggtctggaactgaacctgtgatatctctgaggtatgcc

SEQ ID NO: 4828 - DNA, 76 bp, Homo sapiens
  source 1..76: mol_type = other DNA
cacctcctgtaaccagagcagttcagattttatcagtttatgtattggggtcattggtaagatttcatttgaagga

SEQ ID NO: 4829 - DNA, 302 bp, Homo sapiens
  source 1..302: mol_type = other DNA
gcagggtgcggtggcttacacctataatcccagcactttgggaggctgaagtagggggatttcttgagcccaggagtttgagatcagcctggacagcatggcaaaaccctgtctcctctaaaagtacaaaaattagccaggtttggtggtgcatgcctgtagccccagctactaaggcgcctaaggcaagaggatcacttgagcccaggaggcagaggttgcagtgagctgatatcgcatcactgcactccagcttgagagcaagactctgtctcaaaaaaaaaaaaaaaaaaaaaaaaaaa

SEQ ID NO: 4830 - DNA, 940 bp, Homo sapiens
  source 1..940: mol_type = other DNA
cttctctttcttctctttgcatccggcctgcaaagttttctgcttccactgcttcattaaaaggtcaaagatttcccaattgctaaatgcagtgggctcttttcagtcccgctatctgacttcaatgtagcaggtgatatttttgaaacattctttttccttggcttctttgataattgtctcccactgttttcatcttacctccctgaatagttccttctgactttgagtccttcttcagttcacccttaatgtaggcattctcccaagactctgtacatggtcttctagttcttcaattcataattcctattgggcaatcataaccagttctgcaacttcatcaatcacctgtatgcatgactcccaaaactctcatctgttcatattttcctctaagctccagactcctacattctgcctatagaacatctctcttagatgccacaaaggaaactttaagtcacaggatctaagaggcatttattattctcctcaaactgctccctcttctgaatagcacctgatcaattagctaaggctcttacacttgggaaaaatgctgcattcctccctttcccccatgcctcacaactattctgtagctggatcctgtcaaatctcattccttcacactctgatcatctcttgccttcgtattgtctttttgcttccaatcttgcaccctttctaaatcatcctctacagtgcttccagaataacacagaacacacgtcattccctgttgaaaacacaccgtggctgcctacaggatgatgtcggaacttcttagcatagtaaacatacaggcccctgaatggttgcttaccctttgtccaaatactcattcacatcctatattcttgccttactaaaatacttgacgctttctaaatataccaaactatttcagacagttccttctgtcttcaatgctctt

SEQ ID NO: 4831 - DNA, 1163 bp, Homo sapiens
  source 1..1163: mol_type = other DNA
tgaatgttccctcttcttgttctaatggaaacttggctatttctggaagacacctgttctccccagagccctctcaagtggtgaccttttcctgccattatttcaggacatggaggtggggagggtattctcattaatccccactgtactccttcctcctttaattgagccccactttggttcctctgaagatcttggggtcagactttgtcactcattacccttgttgctatgttaactacctccctgaaaatcctccccaaccttatccattcagggatgactgtggcatctgattcactgtcttcctctctccatcattatatctgtcatcatgtgacttaaacatatctacagaaaatcaatctaactctttggcctctgtgttcccttacttcttcaacttcaatcatcttttccttaacctttcctcagccacctgtctagtgaacagaggaaggtagctgaggagggttatgttctagatcataaagccccccaaatcataccacttctgaaaaatgtatttccataattctattctttggtcactatttccttttcttccattttacttactctggtattcctactctatcttttgacccccacaaggttgtgcaatccattaaccccactacctttttacatttctttccttaatcagctgaggctccacaatgcagcgctataaccactcccttggaaagatcccttgacctttcttcttatgtcacactggccaggaaaaagcccagttctaattaaacctattgatataccttctaactatctatatctaagcaacagaactaatgaaagaaaccctcaaaaactggtctcactttaaatctatggccacaaaacttaaacaggcactcaaaactaccagataaacctattacacttctttaataaacttgtgctatctttctgagatgagttcataccttttgctcattcaatcctttattgctgccttccttccactcactcagctaatgaccttgcctcatattcattccattaatagaagttataattagagtactccctccttctcttgcttttaaatctatcactttacctacatccttactcattctgctttgctttgtagaatgtaaggagactccatgtagctacctaaatctaacccctcc

SEQ ID NO: 4832 - DNA, 943 bp, Homo sapiens
  source 1..943: mol_type = other DNA
cccctaaaaaagattcatcattctacatgtcattaagaacatttttgattcatgggaggaggtctcaagatatcaacattaacagaagtttgaaagaattccagccttcagggaagactttgagaggttcgacttctgtggaagaagtaatggcagatgtggtggaaaagcaagagaactagaattggaagtggagcccaaagatgtaactgaattgctgcaatctcatgataaaacttgaatggaggaggagtagcttcttatggatgagcaaagaaaatggtttcttgagatggaccctactcctggtgaagatgctgggaacactgctgaaattacaacaaatgatttagaatatgacataaatttaggtgataaagtagaggcagggtttgaaaggaccaactccaattttgaaagaagttctaggctgggcgcggtggctcatgcctataattccagcacttttgcgaggccattccactctagtctgcgagacagaggaagaccctgtccccaaaaaaaaaaaaaaaaaaaaaaaaaaaaaaaggaaaaggaaaaagaaattctgctatgggtaaaatgctatcatatgctacagagaaatcttttgtgaaaggaagagttgatcaatgtggtaaattttattgttgtcttctttaagaaactgccactgccaccccaaccttcagcaactaccaccttgatcagtcagcagctatcaatatggaagcaaaatcctccactaccaacaagattgaactcactgaaggctcacatgattgttcgtattttttagcaagaaagtgtttttaaagtatgtacattttttagacataatgctattcacacttaatagatataaatagtataaacttaacttttatatatactgggaagccaaaaagtttgtatgacttgctttatggcaatatttgcttta

SEQ ID NO: 4833 - DNA, 1464 bp, Homo sapiens
  source 1..1464: mol_type = other DNA
tttaaaaacaattttttaaaacacattcaaggtttgcagcaaccctatgtcaaaaaaagtctaaaatgccatttttccaatagcttgtgctcatctcgttgtgtctctgtgtcatattttggtaattctcccaacttgtttattattgttgtatatgttagtgatctatgatctttgatactaccattgtcattggagtgccacataccacacctaggtaagatagtgaacttaatcgatacatgctgcatatgttctgactgctccactgaccatctgttctccagtcactctccctctccttgggtgtccctattccctgacacacgacaataatgaaatcagaacaattaataaccctacaatagcctctaagtgttcaggtgaaaagaagagtcacaggtttttcactttaaatcaaaagctaaaaataaagcttagtgaggaaggcatgacaaaagttgagctaggctgaaagctagccaagatgtgaatgcaaaggaagagttcttgaaggaaattagaagtgctactccagtgtacacacaaataagaaagcaaaattaccttattgctgatctgaagaaagttttagtggtctgaatagatgatcaaagcagccacaacatccctttaagccaaatcctaatccagagcaagccctaactcttttcaattatttgatggctgaaagaggtgagagaagaaaagcttgaagctagcagaggttggttcatcatgtttaagggaagaagtcatttccataacataaaagtgcaaggtgaaacagcaaatgctgatgtagaagctgcagcaagttatccagaagatctagctaagatcactgatgaaggtggctacactaaatgacagattttcaacgcagaaccaacagccttctattggaaaagaatgccatctaggactttcataactagagaaaagaaatcaatgactggattcaaaacttcaaaggaaagctgactcttgttagggatgaatgtatctactgacttttaagttgaagccaatgtttatttaaccattccaaaaaatcctagggccctttagaattatgctaaatctactctgcccgtgctctgtaagttgaacaacaaagcctggatgacagcacatctatttacagcatggtttactgagtattttaagcccactgttgagacctactcctcagaaaaaaaagacatctgtccaaatattactgctcactgacaatgtacctagtcacccaagagctctgatggagatgtacatgcagattaatgttgttttcatgcctgcaaacacaacatccaatctgcagcccatggatcaaggagtaattttgactttcaagtcttatcaagaaacacatttcataacactatgtatggctgccacagataatgactcctctgatgaatctgggcaaagtaaacaaaaagccttctaaaaaagattcat

SEQ ID NO: 4834 - DNA, 759 bp, Homo sapiens
  source 1..759: mol_type = other DNA
taataccagttctacttaagattttccagaaggtgaagaggagggaatacttcttgaagcattatatgaggccagcattacctgatactaaaaagaactacagactaatacctatcatgaacatagacccaaaaattcttcatataatgttagcaggtcaaatccaacaatatataaaaagtaatacattgtaaccaattaggttttatctcagatgtataaggttggtttaatatttggatattcatcaatataattcagcatattaacagaccgaaactgaaaaactagatgatcatttcaatatatacagaaaaaatgtcaaaattcagcatcccttcattataaaaacttcttgcaactgggaatcgaaggagacttcatcattctgataaaggatatctgaaaaccaacagctcatatcaatcttggtggaaaactgtaaactgtccccttacaactggggacgaggaaaatgcctacccttaccacttctagtccacattgtactggaagttctagtcagtgcagtaaggctagaaaaattaaatgtattaaatgtaaaaaaaaacctccaaacacaatcatctttatggaaaatcttaaggaatctaccaaaatgctaatagaaccatcagtgaaaatttagcaagattgtaggagataagttcaatatatagaaattcattgcggccccacctacaaacaatgaacaattggcaattgcaattttaaaacagtactatttacaatagcatc

SEQ ID NO: 4835 - DNA, 312 bp, Homo sapiens
  source 1..312: mol_type = other DNA
ggccgggtgcaggggctcacgcctataatcccagcactttgggaggccgaggcgggtggatcacaaggtcaggagttcgagaccagcctggccaatatgctgaaaccccatctctactaaaagtataaaaaattagctgggtgtggtgggacgcgcctgttgtcccagttacttgggaggctgaggcaggagaatcgcttgaacccgggaggcggaggttgcagtaagccgagatcacgccactgcactccagcctgggcaacagagtgagactccatctcaaaaaaacaaacaaacaaacaaacaaaaaaa

SEQ ID NO: 4836 - DNA, 318 bp, Homo sapiens
  source 1..318: mol_type = other DNA
gccaggcgcagtggctcacacctgtaatcccagcattttgggaggccggggtgggcggatcatgaggtcaggagatcgagaccaccctggctaacacggtgaaaccctctctctactaaaaatacaaaaaaacccaaaaaacaaaaaacattagccaggtgtggtgacgggtgcctgtagtcccaactactccggaggctgagccaggagaatggcgtgaacccgggaggcggaacttgcagtgagctgagaccatgccattttactccagcctgggcgacggagcctctgtctcaaacaaacaaaacaaaacaaaaa

SEQ ID NO: 4837 - DNA, 163 bp, Homo sapiens
  source 1..163: mol_type = other DNA
cattatggcatagtgattaagatgagggaccctggaaccagcccgtgattttgggcaagttattttaggtccactttggactgcttcatctcttaaatgaagacagcaaccaccttcaggagtgtgaaggtgacaacacttaaaactgtgcctggcacattgt

SEQ ID NO: 4838 - DNA, 163 bp, Homo sapiens
  source 1..163: mol_type = other DNA
gtgatgagatggcatgaattcccactcacctgggaatggagacctgagttcaagtctctagtctgccactaagtcagtgaccttgggcaagtccttactttccagatttcagttccctctttgccaaatggagtagaattgacttttaaaggctccttttcag

SEQ ID NO: 4839 - DNA, 110 bp, Homo sapiens
  source 1..110: mol_type = other DNA
attatctggcgatctgacctcaagaaaaacatttagcttctccagagggtcttcgtttataaaataagaatgttgaagtaattatcatctaagatccatttacagctctg

SEQ ID NO: 4840 - DNA, 394 bp, Homo sapiens
  source 1..394: mol_type = other DNA
gcctcactaatgttttgcttccaggcttttcgatagggtgttcttcttgcctggaatgcttgttcctcctccacattcacttccctttgcctaactaattgctacttctaagtgactcatcagcattgatctcatcacgttcttcagaaacccttcattagttcctcagcactggattcggtgaccttccatgctctcccaaagcatcctgacttcacccctacaccagccccacctttctgtattatcactttccattggcttgtttatattccccaggagcaggccatgaggcccgtgctaacatacaaataataatattcattatgtatgtacttccaatccctagcaaaatgcctggaatttaggatgttaataagtattattgaatgaa

SEQ ID NO: 4841 - DNA, 314 bp, Homo sapiens
  source 1..314: mol_type = other DNA
ggctgtgcatggtggctcacacctgcaatcccagcaatttaggaggccaaggtgggcagattacttgaggccaggagttcaagaccagcctggccagcatggcgaaaccccgtctctaccaaaagtacaaaaatcagccaggcatggtggtgtgcacctgtagtcccatctactcagaaggctgaggcaggagaatcacttgaacccaggaagaggcggaggctgcagtgagccgagattgtaccactacactccatcctgggcgacataacaagactctgtcgggaagaaagaaagaaaaagaaaagaaaaga

SEQ ID NO: 4842 - DNA, 369 bp, Homo sapiens
  source 1..369: mol_type = other DNA
tgctatggttttcatattgtttgtttggccctgccaagtctcatgttgcaatttattctccactgttgaaggtggggcctgttgggagatgtttggatgatgggggcagatccctcatgaatggctcggagtgagttctcattcatagtttctttaagaactggctgttgaaaagagcctggcacctccttttctctctctccctctctgcacacatctgcttctgtctgctttctgccatgagtagaagtagtatgaggccctcatcaaaagcagacgctggtcccatactacttgtacagtatttcctttctttttacattacttggtctcagatatttctttatagcaacacaaacggactaaaac

SEQ ID NO: 4843 - DNA, 413 bp, Homo sapiens
  source 1..413: mol_type = other DNA
tgcgatggttttagatgttcttcccctccaaacctcatgttgaaatttgatccccagtgttaaaggtggggcctagagggaggtatttgggtcctggggctgatctctcatgaagagattaatgccgtcactgggaatgagttcttgctcatgagaaccacgagagctggttgttaacgaggctggcacctccccattctctctcttgcttcctttcttgccatgtggtctctgcacacaccagctccctttcctcttctgtcaggagtggaagcagcctgaggctctcaccagacatagatacccaaacttgaatttgttagccatcagaatcctgagccaaataaacctttttatctttaaaaattacctagcctcagatattcccttatagcaacacaaaatggactaag

SEQ ID NO: 4844 - DNA, 109 bp, Homo sapiens
  source 1..109: mol_type = other DNA
cttcactaaggatagagatttctttgtgcacccccatccacttctgctataccagtacattatcatgtacataataggcactcatgaactttttgttcaacaaatgcat

SEQ ID NO: 4845 - DNA, 130 bp, Homo sapiens
  source 1..130: mol_type = other DNA
ttgatgttagaatttctgtattcaaattctgactctgcaatttcaaagctgcataatcttagacaaatagatcaaccttactaaatgacagatttttttcttttatatatgaaaaatataatccctgccc

SEQ ID NO: 4846 - DNA, 114 bp, Homo sapiens
  source 1..114: mol_type = other DNA
gattgcaagttctttaaagatagggaccttattttgtttgtcaaatatcttccacagtttctctcaaggtgccttgtaaacactagagtctgaatatatgtttgcagaataaat

SEQ ID NO: 4847 - DNA, 148 bp, Homo sapiens
  source 1..148: mol_type = other DNA
tcccttatataaagacctgtgcactaaatttctcttacatttaacagtagaaatcagtatactattataagatggtgaactttggtaattgtcataacttttccatcgccttcacttccaagaggcccagagctaaatcttgcactca

SEQ ID NO: 4848 - DNA, 160 bp, Homo sapiens
  source 1..160: mol_type = other DNA
gaacaacagacactgcagactactagagagggcagggagagaaggggcattggtcaaaaaactacttattgggtactatgctcactgcctgagtgcagaacacccatggaacaaacgtgcacatgtacctctgtgtctaaagtaagagttgcacaaacaa

SEQ ID NO: 4849 - DNA, 275 bp, Homo sapiens
  source 1..275: mol_type = other DNA
gcttacaatatcctgcctaattctaccatctcttccagtgtgcaccatcactctatacttactgtcttgagaaggttatgttaccttttgccttcaagcctgtgtgtgggttacttcttcctcttggaccacccttgctttatccccatctcttccactcttgccctcatctggctcatttctatttaaacttcaggtgttaatttagctgacagcaatgctacctggatttccaaagtctggagtatatgtcccacttttctcttccatggcac

SEQ ID NO: 4850 - DNA, 647 bp, Homo sapiens
  source 1..647: mol_type = other DNA
cacctcccagtttttacttctgcactcttccagtctgttcttcatacagcagccagagtgattattaaaacccccaagcaaccaaccaaagaaaacacctccccatttagtcatttccctttgcttaacacttctgaaaagacttcccactgttttaagaataaaaacccaaatgcataccattgccttgaaggcctcacatgatttgttctctgctcacctctccaaacatcttgcaatactttctacttcgctttctgctttcagcccataggctttatttttcttcatagaacataccaaattccttcccttcacagatcctttaaacatgttctctctctgcctggatgcttctcccatgtccctctgctgggttaattccaatgctcccttgagattcccataatcttgagtagccaggtcccccactccatttgctatatcaccatgcacacctctttttgtgtacttaatgcagttataactttccatctctgtgtgtgatcatgtgataactatccttcccattagatacattccatggaggaagaaaccataaaaatcatcatggaaaccttagtgactcacacagttcctgatatatatataataggcctttataaatgtgtgttgaatgaatgaat

SEQ ID NO: 4851 - DNA, 131 bp, Homo sapiens
  source 1..131: mol_type = other DNA
ggccaagtgcagtggctcacaccggtaatcccagcactttgggaggccgaggtgggaggattgcttgagctcatgagttcaagaccagcctgggcaacatagcgagactccatctctataaataaaaaaaa

SEQ ID NO: 4852 - DNA, 29 bp, Homo sapiens
  source 1..29: mol_type = other DNA
ctccttcatttgcaggacatcaagggctc

SEQ ID NO: 4853 - DNA, 286 bp, Homo sapiens
  source 1..286: mol_type = other DNA
ggggtggcaaaccacagctaagtctcgctcaccactgcaagctaagaatggtttttacattttgggttggaaaaattttttttgaatatttcatgacacatgaaaattattcaaatgttagtgccgataaataaagtggtactgaaacacagccacacaaacttgtttttgtactgtctacagctactttcacactacagccgcagagctgagcagttcagcagaccgtatgtcccacaatgcctaaaacattgactatgtttacagaaaaagtttgctgacccct

SEQ ID NO: 4854 - DNA, 238 bp, Homo sapiens
  source 1..238: mol_type = other DNA
gagaggtaaaggaatctactagaaaaggacatgggaattttagtgccaggctgacctgaatttgaatttccgttccatctcttcctggttcctacttatactgtgcataagtaacttcctactaagttacgtcccctgcatctgtaaaacaggggtttactataagagttaaataaatgatataaatagagcactgctatgcttggcatatcatagacacacattacatgagaattct

SEQ ID NO: 4855 - DNA, 249 bp, Homo sapiens
  source 1..249: mol_type = other DNA
ttaaaaaattaacaaaatccaatgatgaagcatcctcagggaaagtggaacaatcatacgttactgatgacattaaattggtagcgctgtcttggaaggcaactgggcaatgtgtttcaagagcatgaaattattcaaacccgttggtaaggcttcccacagctaagaatttatcctaaggaaatagttcaaatgaaaagcattccatgcatgaagctgttcactgcagcactagtttcaaagcgaaaa

SEQ ID NO: 4856 - DNA, 214 bp, Homo sapiens
  source 1..214: mol_type = other DNA
cgcgggcggcggcggcggtgggagcggcggctgcagaagcagcagcagcagaaacagcggcgggtactctgtgccccgcgtcccggaggcagccgactgcgccaccccaccctcgcacggccgggcgggacccgcgccaccagcccggacctccgtcgtcccgcggcgaccaaaacccccgctggccccaccgctgtgactactctggactcgc

SEQ ID NO: 4857 - DNA, 1271 bp, Homo sapiens
  source 1..1271: mol_type = other DNA
tcggtacaaaagtaattgtggtttttgcactgttggaatttgtcatttgatattggaatacattcttaaataaatgtggttatgttatacatcattttaatgtgcatttcttttttttttttttttgctaatgacattgctgtttgttttatatttattttagactatggaaatgatgttagacaaaaagcaaattcgagcaattttcttattcaagttcaaaatgggtcataaagcagcggagacaactcacaacatcagcaacacatttggcccaggaactgctaatgaacgcacagtgcagtggtggttcaagaagtttcacaaaggagaggagagccttgaagatgaggagcatagtggccagccatcggaagttgacagtgaccaattgagagcaatcatcgaagctgatcctcttataactacacctgaagttgctgaagaactcaacattgaccattctacagtcgttcggcatttgaagcaaattggaaaggtgaaaaagcttggtaagtgggtgccttgtgaactaagcgaaaaacaaaaaaattgtcgttttgaagtgtcatcttctcttattctacgcaacaacagtgaaccatttctcgatcagattgtgatgtgccatgaaaagtggattttatacgacagccagtgacagccagctcagtggttggaccaggaagctccaaagcatttcccaaagccaaacttgcaccagaataaggtcatggtcactgtttggtggtctgctgctggtctgatccactacaactttctgaatcctggcgaaacccttacatctgagaaatatgctcagtaaatcgatgagatgcaccaaaaactacaacacctgccgctggcattggtcaacagaaagggcccaattcttctccacgacagtgcccaaccacacattgcacaaccagcacttgggaaattgaacgaattgggctacgaagttttgcctcatcctccatattcacctgacctctcgccaaccgactaccacttcttcaagcatcttgacaactttttgcagggaaaacgcttccacaaccagcaggatgcagaacatgctttccaatagttcgctgaatcacaaagcatggatttttatgctacaggaataaacaaacttatttctcgttggcaaaaatgtgttgattgtaatggttcctattttgattaataagatgcatttgagcctagttataatgatttaaaattcacagtccaaaaccacaattacttttgcaccaagctaa

SEQ ID NO: 4858 - DNA, 649 bp, Homo sapiens
  source 1..649: mol_type = other DNA
cgggagggaggtgggggggtcagccccccgcccggccagccgccccgtccgggaggtgaggggcgcctctgcccggccgcctctactgggaggtgaggagcccctctgcccggccaccaccccgtctgggaggtgtacccaacagctcattgagaacgggccatgatgacaatggcggttttgtggaatagaaaagggggaaaggtggggaaaagattgagaaatcggatggttgccgtgtctgtgtagaaggaggtagacacgggagacttttcattttgttctgtactaagaaaaattcctctgccttgggatcctgttgatctgtgaccttacccccaaccctgtgctctctgaaacatgtgctgtgtccactcagggttaaatggattaagggcggtgcaagatatgctttgttaaacagatgcttgaaggcagcatgctcgttaagagtcatcaccactccctaatctcaagtacccagggacacaaacactgcggaaggccgcagggtcctctgcctaggaaaaccagagacctctgttcacttgtttatctgctgaccttccctccactattgtcctatgaccctgccaaatccccctctgcgagaaacacccaagaatgatcaattaaaaaaaaaaaaaaa

SEQ ID NO: 4859 - DNA, 310 bp, Homo sapiens
  source 1..310: mol_type = other DNA
ggccgggcatggtggctaaccctggtaatcccagcattttgggaggccaaggtgggtgaatcacctgaggtcaggagttcgagaccagcctggccaacatggtaaaacccagtcttaactaaaaatataagaattagccgagtgtggtggcacgtgcttgtaatcccagctactcaggaggctgaggcaggagaatcgcttgaactcgggaggcggaggttgcagtgagcatagatcgcgccactggactccagcctgggcaacaaagtgagactccgtctcggaaaaaaaaaaaaaaaaaaaaaaaaaa

SEQ ID NO: 4860 - DNA, 750 bp, Homo sapiens
  source 1..750: mol_type = other DNA
ttggtgggaatgcaaattagtacagccactatggagaacagtttggaagttcttcaaaaactaaaaattgagctaccatgtgatccagcaatcctactgctgggtatttacccaaaagaaaggaaatcagtatacggaagagatatccacactcctatgtttgttgcagcactgttcacaatagctaagatttgaaagcaacttgtgtccatcagcagatgaatggataaagaaactgtggtgcttgtacacaatagagtactattcagccataaaaaggaatgagattcagtcatttgcaccaacatggatggaactggggtcattatgttaagttaaataagccaggcacagaaagacaaacatagcatattctcacttatttgtagaatataaaagccaaaacaattgaactcatggacacagacagtagaaggtgaccagaggctgggaagggtagtgagggatgcggaggttgtgaggatggttaatgagtacaaaaacaccagaaagaatgaataagacctactgtctgatcgcacaacagagtgactatagtcaataataattgtagcttttaaaataatttaaagagtttaattggattgtttgcaactcaacggataaatgcttgaggggataaataccccattcttcatgatgtgcttatttcacattgcatgcctgtatcaaaacatctcatgtaccccataaatatgtacacccactatatgcccacaaaaattgaaa

SEQ ID NO: 4861 - DNA, 259 bp, Homo sapiens
  source 1..259: mol_type = other DNA
caaaagtaataaactggcagcccacagacttttgttggcttacaaaatgttttaaaaataattgagccaactttttaacaatcgggacatttcacacgaaatccaggtttcatgtttctcctaaagaatcacaagatttggaaacctaggctcccattcctgtgggacacagttggctgcggctggggacagtggcccctctggaagggcaggcatcggctcacacagatcattctgttcatttaggagacctgcctgg

SEQ ID NO: 4862 - DNA, 103 bp, Homo sapiens
  source 1..103: mol_type = other DNA
ccagctgtccctctgtatctggagtctagacaaaacaagatgaaataaacttctagtgtagtgtgaaggaatcagattcaaaccaagagagaagttctagaca

SEQ ID NO: 4863 - DNA, 1140 bp, Homo sapiens
  source 1..1140: mol_type = other DNA
tgtttttttgagaaaatcaaagctgtctgaagaaaacacccacaagcctccccagaccatatgccacctttatatgcatggccatggctctgccttctctcctgatacaaggcttctccccaggaccgccctccccatgtgcactggctggactctgacctcttttgcctgttgaaagacatcaccccagccattgtccactctctttcctgcagcgttacattttcttctgaaccggatcattcccatcagtttacaaatctggaagctcatattcctctattcctcatgtctgaaaaaacacactgctcttgacttcccatgcaccatgccccaatctagcgcgctgttctcctttgcctccaacaaccttctctcgaaagggttctttctttctccaattcctctctttctcctttctctttaattccctcaaatcaagctttcattccaaatgctgcaccagagtgtccccttcagaggtcgttgcattgctaagtcccatagcccctcccagttcttatcctacttggcctgttggaggcacccagcgcagcttcttgtttccttcttcactgacttcactttcttcactggctccaggctgctgcattctctcttttccttctacatgggtagtagaaggaaactaccaagtgggactgttgctgagccctgaagctcagtctttgagaccctctcctctccagctgctctccctcatatggggattttatccagtctcatgggtagaaacctcagatgcattttgaatccgtctccatgctggcattgcccacctctcgtttccaatggagacctgtcttccgaactgtaggctcgtatgccacctatctgctcagcagctccacttggatgccaggtgagcatcttacacttggcatgaccaacacagagcgctgagctgtcccatgagatgtgaccctcccacaatcaaacccaactcaataaatggacacccaggctgaaacctgtgagtccttgtgacccctctcttcacttacacccccagcctatattagctctgccttcaaagtatagctagactccaactgctttgcttcaccttcacagctactaacctggtgcagtcttctctaatctctcctagaatatctg

SEQ ID NO: 4864 - DNA, 84 bp, Homo sapiens
  source 1..84: mol_type = other DNA
ctaggccccattttcccctctgaaaataagagggttggatcaaacgatctctggggccttagcatctcaaatcctgtggatcct

SEQ ID NO: 4865 - DNA, 2761 bp, Homo sapiens
  source 1..2761: mol_type = other DNA
gtggctggtaagatggccaaatagcaacagctctggtccgcagctcccagcgagatcaacacagaagacaggtgatttctgcatttccaactgaggtacctggctcatctcactgggactggttagacggtggatgcagcccacagagggtgagcagaagcagggtggggcatcgcctcatctaggaagtgcaaggggttggggaactcctcccctagccaagggaaactatgagggactgtgccatgagggacagtgcactctggcccagatactacgcttttcccatgctcttcgcaacccacagaccaggagataccctcaggtgcctacaccaccagggccctgggtttcaagcacaaaactgggcggccatttgggcagacactgagctagctgcaggagttttttttttttttttttttttttttttggtaccccagtggcacttggaacgccagcgagacagaactgttcactcccctggaaaggaggctgaagccagggagccaagtggtctaactcattggattccaccccaatggagcccagcaagctaagaaacactggcttgaaattcttgctgccagcacagcagtctgaagttgccccgggatgctcgagcttggtagaggggaggggcatccgccattgctgaggctggagtaggtggttttcctctcacagtgtaaagaaagctgccagttcgaactgggtagagcccactgcagctcggcaaagccactgtggccagactgcctctctagattcctcctctctgagcagggcatctctgaaagaaaggcagcagccccagtcttacagataaaactcccagctccctgggacagagcacctgggggaaggggtagctgtgggcacagcttcagcagacttaaatgttcctgcctgccagctctgaagagagcagcagatctcccagcataacactcaaagtctgctaggggacagactgcctcttcaagtgggtccctgacccctgtgcctcctgactggaagacacctcctagcaggggttgacagctcacctcatacaggagagctccggctggcatctagtgggtgcccctctgcgacaaagcttccagaggaaggaacaggcagcaatctttgcttttctgatgcctccactggtgatacccaggcagtgtctggagtggacctccagcaaactccagcagacctgcagcagaggggcctgacagtgagaagggaaactaacagaaaggaatagcatcaacaaaaaggacatccacacagaaaccccatctgaagttcaccaatatcaaagaccaaaggtagatacatccacaaagatgaggaaaaacctgcacaaaaaggctgaaaattccaaaaaccagaatgcctcttctcctccaaaggatcacacctcctcgccagcaagggaacaaaactggacagagaatgagtttgatgaactgacagaagtaggcttcagaaggtgggtaataaactcctccgagctaaaggagcatgttctaacccaatgcaaggaagctaagaaccttgaaaaaagtttagaggaattgctaactagaataaccagtttagagaagaacataaatgacctgatggagctgaaaaacacagcacgagaacttcgtgaagcatatgcaagtatcaatagccaaatcggtcaagcggaagaaaggatatcagaggtcgaagatcaacttaatgaaataaagcgtgaagacaagattagagaaaaaaagaatgaaaaggaatgaacaaagcctccaacaaatatggaactatgtgaaaagaccaaacctatgtttgattggtgtacctgaaagtgagggggggaatggaaccaagttggaaacactcttcaggatattatccaggagaacttccccaacctagcaagacaggccaacattcaaattcaggaaatacagagaacaccacagatactcctcgagaagagcaacctgaagacacataattgtcagattcaccaaggttgaaatgaaggaaaaaatgttaagggcagccagagaaaaaagtcaggttacccacaaagggaagcccatcagactaacagcagatctctctgcagaacccctacaagccagaagagaatgggggctaatattcaacattcttaaaagaactttcaacccggaatttcatatctagccaaactaagcttcataagtgaaggataagtaaaatcctttacagacaagcaaatgctgagagattttgtcaccaccaggactgccttacaagagctcctaaaggaagcactaaatatggaaaggaaaaaccagtaccagccactgcaaaagcgtaccaaattgtaaagaccatcgacactatgaagaaactgcatcaactaatggacaaaataaccagttaacatcataatgacaggatcaaattcacacataacaatattaaccttaaatgtaaatgggctaaatgccccaattaaaagacacagactggcaaattggatagactcaagacccataggtatgctgtattcaggagacccatctcacacgcagagacacacataggctcaaaataaagggatggaagaatattaccaagcaacggaaagcaaaaaaacaaaacaaaaaaaaaaaaaaaacaaaaccaggagttgcaatcctctgaaaaaacagactttaaaccaacaaagatttaaaaagggcattacataatggtaaaggaatcaatgcaacaagaagacctatctatccta

SEQ ID NO: 4866 - DNA, 126 bp, Homo sapiens
  source 1..126: mol_type = other DNA
gtccctactctcccccggcctgtggtgtcagggtggacaggagccctttggcttccctggggttttgcttcctcacatagggaattgatggaggtgggctagatggctttaagagacttctcaact

SEQ ID NO: 4867 - DNA, 133 bp, Homo sapiens
  source 1..133: mol_type = other DNA
gccggcgcggtggcggcgggcgccagtggtcccagccactcgggaggccgaggtggagtgtcgcttgagcccaggagttccagacaggcctgagcaacagagccagaccccgtctccacaaagaaagaaacaa

SEQ ID NO: 4868 - DNA, 359 bp, Homo sapiens
  source 1..359: mol_type = other DNA
ggaaaagcatcttgcacgtgtaattaaggatctcaagatgagatcatcctgaattatctgagagaggcttaaatccaaagacaaggggtccttataagaaagaggaaggcacagaagaagagaaggtgatgcgaagacagaaacagagtgcagtaatacatctacatgccaaggaatgccaagggttgtcggcagccacgggaagccatgggtgagaggcatggaacagattttctcacagagcctctcgaaggaaccacactacaaacaccttgattttggatttctggcctccaaaactgagagagaataaatttcagttgttcagaggtaccaggtttatggcaatttgttatagc

SEQ ID NO: 4869 - DNA, 1078 bp, Homo sapiens
  source 1..1078: mol_type = other DNA
acattcccttgctctatcagctgagagagtctagaagcaacaacacctcactagcaatgaacacaccagtgcccagatcttggtttctaacactgttctaggaaaggagccagagcttcttggagaattgactgattcaagggcaaaggcaggacatgcagaagataagccaggagcatctttagtagcagaaattaaggagatgcccaaaaagccaagtgatgagcacctgtcagaggcacacaggagctgggaacccaccacgggagctcaccaaggccaacctcgaagaagctgagcaggaaaagaagcaaagtcacactggagtccagcccgagcatgggctgagtatccatgagtccatagcaatataaataaaagattgagtacataagtaatgtggaggcatggatgagtatcccccccaggacatttcccagtcactcatgtagctacttctcctcctcggaagtggagcacaacccatacccctaagtgtcggctgtgcatggcgacgtccttccagagagtacagcatggagagggggacttcacagtggggagacctcagccagccgactacagccaccactgtcagtgaagagtcatgtcagcagcgtgtgtacccttgttatgacatgatgagaatggcatttatctgtgtggtcttcctcccaaaacccataaccccaggctatttacgaggaaagcctcagacaaatcccaactgaggagcgtcctgcaatgcacctgattagggctcttcaaaccatcaaggtcatcaacggcaagggccgtctgagaccctgtcacagccaagaggagtccaaggagatatggcagccaaatgtgatggggtcctgggcaaaaacagaaaattgggtaaaacctaaagaaatctgaataaatgcagactattgttagtaataatgtatcagtgttagtggtgacgaatctagcctactaatatgttaacaacgtgagaaattgggtatgagtatatgataactttctgtaatattcttgcaaatttttagtacatgtaaaactattgcaaacaaaataatttattttaaaa

SEQ ID NO: 4870 - DNA, 231 bp, Homo sapiens
  source 1..231: mol_type = other DNA
cttaccgtgttcaccaaacttgtgtccaaatagctttgggctgatgcaaaaatatctatgtggaagagaagagttgttctcatggagggccttcagatgagtgctatagactctctaggcaactccaagaggcttctcaagcagggtgggcagtgagagctgctatggaatcaatggacaaactgacagggactgctttgaaagacagtactcagttgagtatatatattc

SEQ ID NO: 4871 - DNA, 152 bp, Homo sapiens
  source 1..152: mol_type = other DNA
gactaaaagccacaaaacctcgacctagtccccgctcttccactactgagctgtgccatcgtgggaaggtcgcctcactaatcactgtaagccccagctgcctgatctgtaaaataggtttgaaccagtggtaacgaccttcccagctttaa

SEQ ID NO: 4872 - DNA, 694 bp, Homo sapiens
  source 1..694: mol_type = other DNA
aagatccaactctatgttgcctatgagaaactcatgttaactccaagtcacaaattggttgaaagtgagaggacagaaaaatatatttcatgcaagtggtaactgaaagatagcaagtagctatattatcagacaaaataaagtttaaatcagatgtttacatgagacaaaggagattatatattaataaaaagattcagtagagcaagatgatataaaaattataaacatttatctacctaataacaaaccatcaaaatatataaagcaaaaatggacaaaattgaagggagaaatacagttgtataataatagttggagactttagtaccttactgtcagtaatgaatagtacaaccaggtagaagacaaataaggaaggacctgaacatcatgataagccaactagagccgacatatacagaacactctacccaacaataacagaatacatattaatctcaagtgcacatgggatattctccaggatggactatgtgttagtacccaaatgaagcctcaatagattgaaaaaaaaaatcatacaaaacctcttctaaaacaagttagaagtgaataacagaggaaaaatgggaatattcacaaatttgtggaaattaaacagatgtcctcaagcaagaaacaggtcaaagatgaaattacaaggaaaaatagaaaatacttgagacaaata

SEQ ID NO: 4873 - DNA, 307 bp, Homo sapiens
  source 1..307: mol_type = other DNA
gccaggcatggtagctcatgcctgtaatcccagcatgttgggaggctgaggcaggaggattgcttgagcacaggagttcaatacgagcctgggaaacagacagagtaccggtctctacaaaaaaacaaaaatgagccaggcacagtggcgcacacctgtagttctagctactcgtgaagctgaggtgggaggatcacttgagcctaggaggtcaaggctgcaatgagctgattgtaccaccacactccagcctgggtgagaagatgagagacgagaccctgtctcaaaaaaaaaaaaaaaaaaaaaa

SEQ ID NO: 4874 - DNA, 433 bp, Homo sapiens
  source 1..433: mol_type = other DNA
tgtcctaaggaagtaattgaataattgcccaaagattgtatgtatgaggctgttcatcccagcactgtctaagctagtaaaaattggaaacaatttaagtatctagcacattggattggttataaagcaaggaatgttcacacagtaggatattataagtatgctgatggaaatctatattgccaggaaaagctattcattatgcgttgtgaagtcagaaagtaaaaaagggtagatagaagtattcgaagtatagttccattttttgagactaataaaacatatgtttaaaaggacactaaaaactggagttatagatatccagatagaaacagtagttatctttgggtagaagaataatgagtgatctttacttttttactttttattcatctttgtgtttttatttatctaaaatgggtattgattttta

SEQ ID NO: 4875 - DNA, 233 bp, Homo sapiens
  source 1..233: mol_type = other DNA
aaaaatatttctatccaagcagcacgattaaagtcacaaatatgttttcagtacaagaggtctatttatttggtattcataaaatggttcagcttaaagctggtgactgtcacagataacatcactctggatgatacattattcaacactggcagctgaaaggatccctttactatatgagcaagtggaaaagcagtaactttcaattttcaacgcttccacactgcaaaatc

SEQ ID NO: 4876 - DNA, 831 bp, Homo sapiens
  source 1..831: mol_type = other DNA
tctttatttagctcctttgacatcactctctcctgttcattcttataatttgctgtcctttgctttggtggacttttcataggctcatctttctctaccatctttctttaaagaatggcattctccagggttttatcagtatgttgctattcctgtgcccacccatacattatcttcaggagatttcatccactctgattattttgactatccacccccgtgttctgacatctccaaaatctctctgacctatcttctgcctttcatactcctgtatataactgcctgttggacacctttacatgaaagttttgtagctatcttagaccctgtgttcaaacttacactattcaccattgcctactctcccacccattaaaacaacacatacatctgaagttccaatttcagttaatgggatcaccacccaaccacttaccaaattaggtttctgggaattattttagacttctctagattctttcctctccccaatccgtcacagtcattctgtcgctaacttttgccagttttaaagttaaatgttacaccaatctccctgcttctttctacccctactgagacccatctagtccatgtcctcattatgtcttgcttgatctccttacttctaggcttactcttctttaattaatcctttgtattgcagccacagaagagactcatctaaaacacacaattgaccaaccacgtcacttaatacataaaccacttcaaggtttcccaaagcacagaataaaaaatttaggctccttagcataacatataagtctttctttgatctgacccattttgcctcttcccatctct

SEQ ID NO: 4877 - DNA, 571 bp, Homo sapiens
  source 1..571: mol_type = other DNA
attgccacaacctcctaactactctttctgcctccagttttgtttccccaaacccacccccaatttaaccactagagtgtttgacttaaagtgtaagtatttccatgtcattccccttctttaaaacccttcattattccttcatcttctaaatataaaatctaagcttcatagctctccaccatcttgtttctgcctgccttctccaggcttatcccctgctacttcctggcatgatctatgtgggtcagtacctgcaaactacatatggttgccagaaactattaccctgttttttgtgtctgtgccctcgttcatgctgccactttgtctggaatatccctataacacttcccctggctaactccccctcattcaattacttcagggttaatcttatgtgcttccttaacctgcatttctaagtatctctgcatgtgtctgtctccaattagaatgtaaggtctttgaggcaagggacttcatctaattcatctatatttccagtgctatagatagaaactcgcacagaaataggaccacttcaatagagattagcttaatacatgca

SEQ ID NO: 4878 - DNA, 256 bp, Homo sapiens
  source 1..256: mol_type = other DNA
aattgaatattgtgtttttgaaccagtctgtaagatttttgttagcagaagaattttacctattgcatggaaagatgctcattatagtgaagttaataaagcacctttaaaaagcaatctctatattctttttttgttaaaaatttatattgattgtacttaatacatgaaaagaaaagtactgaaattaaatataccaaaggattaatatagggactcattctatgagatgggttaatgtattttttatattttc

SEQ ID NO: 4879 - DNA, 246 bp, Homo sapiens
  source 1..246: mol_type = other DNA
catgggaatatgttcattccatgttgtaaagtaaaacataacaggttatggcaaagcagcatatttaatatcagctcacatatgtaggataaaattccaaactttgtgtgtgtgcgtgtgtgtatacatacatccatataacatatatcacaaacttaaccaagcttatttctgtgtggtgtgaaattttatttgttttcttctttttgttctttttgcttatatgtactttttaatgaacacgtg

SEQ ID NO: 4880 - DNA, 247 bp, Homo sapiens
  source 1..247: mol_type = other DNA
tgcaaatgtgtgaaagtttccaattgaaaaatagacctggaaaatgggtcaaaatccaaaatccaatgagatgctggtaccaaggaaattacctaaaacaaaatttcatcagatgattaaaagtaaaatggaggtcaaagatacatcagaaaatgctaacagaaagaaagctggggccagattttaatattaggcaaaaatgaattcaaggcctaaagcacacaggataaggacggctgcgtgaatg

SEQ ID NO: 4881 - DNA, 272 bp, Homo sapiens
  source 1..272: mol_type = other DNA
ggaaacaacaacaacatcatgcaaaaaccctgcaaagaaaacgaaggaaagccaaagtgcagcgtgccaaagagggaggaaaaacgcccgtatggagaatttgaacgccagcaaacagaagggaattttagacagaggctgcttcagtctctcgaagaatttaaagaggacatagactataggcattttaaagatgaagaaatgacaagggagggagatgagatggaaaggtgtttggaagagataaggggtctgagaaagaaatttagggc

SEQ ID NO: 4882 - DNA, 164 bp, Homo sapiens
  source 1..164: mol_type = other DNA
tgttgacaagagtcatatgtaaatctcagcaacatcgaatgactggagtaaaacgatagcaaatatttatcaagaaagtgcagacaaacagaaagcagtggcaacattaataacagaaaataattgaattgtcagagaaattaattaaatgggataaggacggt

SEQ ID NO: 4883 - DNA, 220 bp, Homo sapiens
  source 1..220: mol_type = other DNA
atggaaaaatgctcattgtatattgcaaagtgaaaataacgagttgcaaaacagtgtatacatatatgtgtgtatatatgtacactttatttgtacatttctatgtgacataatgcaaaggaaagtgtctgattttattatacaccaaaggttaacagtgaatctctgtgtgatctctttttttttctttttgcctatctgcatcttctcacttgccaaa

SEQ ID NO: 4884 - DNA, 233 bp, Homo sapiens
  source 1..233: mol_type = other DNA
aaatgtgtaaagttcttttattaaaagacagagacttgtagattggttcaaaatacaataaacaatgagatgcagataacaagagatacatctaaaaccattaatagcaacaggttataagtagaaatatggacaaaggaatatcaggaaatgctaataaaaagcaagctatatggtattgttaatatcagataaaaatcaaggtaaactacattaaataggggtaaggatgg

SEQ ID NO: 4885 - DNA, 163 bp, Homo sapiens
  source 1..163: mol_type = other DNA
aaaaagtacatttgtatattacatatatggacataacttgtgaaggatgaaagaaagtacagcctctcggtggtgggattatgaatgatttttctccttttgcttgtttgtattttctatattcctaaaattaacacacattattattgctagaataataaaa

SEQ ID NO: 4886 - DNA, 156 bp, Homo sapiens
  source 1..156: mol_type = other DNA
atggaaaaatttaaagctaataaagcaatttaaaaagcaatctatacatttattgtctcattaaaaatgtatacttacatataacagatgaactaaaaaaaaatctgagattaaatacactagagtgttaattggtgaacatttctgtgtgttaac

SEQ ID NO: 4887 - DNA, 178 bp, Homo sapiens
  source 1..178: mol_type = other DNA
catggaaaaaatgttgatggtgcattgtaaaattaaaaaacacaacttgcagaaccaaatatatggcatcagtacatttttgtaaaactacaaagatacttacctagtaatatagtatagaaaacaattctgaaagctgtgtccactaaaagattaacagtggttatctctgggtgat

SEQ ID NO: 4888 - DNA, 181 bp, Homo sapiens
  source 1..181: mol_type = other DNA
aacctcaactttaagcgagttacatgctaaacatctaaaataaagcctcacaaaaagttaaaattcagaatatgggaaaaggcattaagaaaatgcaaacagaaagtccaggtggcaatggcaatactattagcaggcaaaacagaattaaaggccgaacacattaaataggataaggacg

SEQ ID NO: 4889 - DNA, 225 bp, Homo sapiens
  source 1..225: mol_type = other DNA
aaagatgtacattatatattgtgaaacgaaaaaagcaattttcaaatggtatatattgtatcccatttttgtaaaaaaaatgtatatttatatattaatatgcaaagaaaaagctaaaagtatagacttcaaaggcataacagtggttgtgtggtaagataataggtgattttttaaatttttgttttatctgaatttctcattttttcaggacaaacgttttac

SEQ ID NO: 4890 - DNA, 159 bp, Homo sapiens
  source 1..159: mol_type = other DNA
ggatcaggagatctgatcctgattgcagaaccttccctgattacagaatcttgggtaagtgcctcccttctgtcctcagttctcaaacaggataataccacataaccttcctaactgtccaggaatattttgaaaattaataagctcctatctgggaaa

SEQ ID NO: 4891 - DNA, 1151 bp, Homo sapiens
  source 1..1151: mol_type = other DNA
aaaaattcttaacaaaatactagcaaatcaaattcaatatcacatgaaaaaaatgatacagcatggtcaagtggggtttatcccagggatgcaagggtgattcaacatacccaaatcaataaatatgatacatcaaatcaatggaaagaagaataaaagccatatgattctctctcaagttgcagaaaaagcagtcaataaaattcaatatccctccatgatagaaactctcaacaaacgaggcacagaaggaacatacctcaacaaataaagactacgtggactcttctctgagaactggaacaaggcaaggatgtcaactttcaccacttatattcaacataatactggaattccaaaccagagcactcaggcaagaaaaaataataaaagacatccaaactttaaaatagaaaattaaattgtctatctttgttgatgacatgatcttacatctagaaaaacctaaaaactccaccaatacacttatatctgataaatttagtaaagtctccagatatgaaattaacatacaaatcagtcgtgtttctttatactaataataaactagctaagaaataaattaagaaggcaatcccacttacaatagctacaaaaaataaaaatacctagtaataaatttagcaaaggaggtgaaaaacctccataaggaaaactactaaagtctaatgaaagacattgaagagagcccaaaaaatgaagagacactccatgcttatggattggaagaattaacatcatcaaaacaaccgtaagacccaaagcaaaccatacatttaatgtattctttatcaaaatatcaattccattttttgcagaaatagaaaaaaattcctaaaatgtcacagaacaaacaagattcagaatagccagagtaatcctgagcaaaaagaacaaaactagaagtaatacagtacctaacttcaaaatatgttacaaggttagagtaattaaaaatcatcgtattgggataaaaacaaacacatagaccaatgaaacagaataaaaaaaaaagaaatgaatgcatgtatttacagccaatcgatttttgacaatggtaccaagaccatacattggagaaataagcactctcttcaataaatggtgccgggaaaattgaatatccatat

SEQ ID NO: 4892 - DNA, 5388 bp, Homo sapiens
  source 1..5388: mol_type = other DNA
gggggcaaagcaagatggtggaataaaaggctccacctatcattttcctctcccaaggacataaatttaacaactatggacacacaaagaataacaccgtgacaagaataaaaaaatcaggtgagcactaacaatacctggttttacctttctgtcactgaaagaagcactgaagagatagaaaaaaagtattgaagtgctaatgtcacccctccctcacaccctggcagcagcagcatggtgctgagagagtttccgtgttctgggggaagggagagcatggcagttgtgaggtgttgaactcagtgctgtcaagttagagcagaaaggaaagccagtccaaactcatctgatgcctgccatagtgggagtatttaaaccagacctagccagaagggaatcaccgcttgagttcctctaaacctcactaccacgttctaaagtgctcagagactctaaatgaactcgaaaggtaggctaggccacaatgatttcaacctttagatgagttctaatgctgaaatgggcccagagacagtggactggtggggcacataacctactgaaacatcagctggggtggctaagaaagtgtgggcattacctctcccctaaccccaagctacatagctcacagctccaaaagagaccccttccttctgcttgatgagagaggagggaagagcgaagaggactttttattgcatgttgaataccagctcagccacagcaggataggacactggtcagaatcccgaggcccccattccaggccctacctcccaggtaacgtttctagacacaacccaggccagaaaggaacttgctgccttgaagggaaggacccagtcctcgcagcatttattacctactaaccgaagagccctagaccctgaatagcaagcagagatatccaggtactactttgaaggacttcagtgggactctgagacttactggcttcaaacatgtctcagcacatttccaactgtagtggctacagggcgagacttcttctgcttaagagcagaggaaagagtaaaggggactttgtcttgaaccttaggaaccaggtcaaccacagggggctgtaccaagtgggctcttggagtacacaattccaggacttgcctcttcaatggtattcctggacctctcctgggccaaagggaagcccactgccctgaaaggtgagtcccaagtcaggcagcattcatcacaaacagacataggagcccttggacctaaagggaacattgacagtggtctggcaatactccccatgggcctgtgatggtgatgaccacagagtgaggcttctttacatttggaaaggggaggggagactggaacgactgcattttgtgccctcactgacagctcagccacaatacaatagaacaccagcaagacttctaaggttttggactcttcttcctgactccaagatggcactcttggacccacatggggcctgggagcactcactgctctgaagggaagggtgcaggcctaactttccacctgctgattttagagtcccagggccttgagtaaatataggcagtagccagggagtggttactgcaggcgttggaaaacatgcagtgctgtgctggcttcaggtctgacccaacacagtcatagtggtggtggccacaggggtgcttatattattgcatccccagtttcaagtcgctcagaacagagagagatactatatttatttgaaagaacataaaaaagagaacaagaattatctgcctgggaatccagagaaatctcccagatgttgtccaagaccatcaaggtagtacgtctacgaatctgcaagaaccacagtgttactgggctcatggttcctcataaagcagatacagcttagatgacaacacccaagtcctctcaaatatctgggaagccttcacaagaaggataggtacaaacaagcccagactgtgaagactaacataaatacctaactcctcaatgcccagacacagacaaacatctacaagtataaaagacagtccatggaaacatgacctcaccaaatgaactaaataaggcaccagggaacaatcctggagaaaccgagatatgtgatctttcagacagaattcaaaaaagctcttttgaggaaactgaaagaaattcaggataacacagagcaggaattcagaattctattagataaatttgataaattgaaatagttaaaaagaatcaagcagaaatttgggagctgaaaaatacaattggcatattgaagaatgcatcagtgtcttttactagcagaattgatcaagcagaagaaagaaatagtgagcaagctattgaaaatagggcaggcagtttgaaagtacgtagaggagacaaaagaaaaaagaaataaaaaacaatgaagaacacttacaggatctagaaaataggtggaaaaaagcaaatctaaaagttattggccttaaagaggaggtagagaaagatataggggtagaacatttattcaaagagataataacagagaattctcaaacctagaaaaagatagtaatgtccaagtacaagaagattatacaacaccaagcagatttaacccaaagaagaccacctcaaggaatttaataatccagctcccaagaaacaaggataaagaaattatcatgaaaacagcaagagaagagaaacaaataacatataatggatctccagcacatctggcagcaaacttttcggtggaaatttcacaggccaagagagtggtatggcatatttaaagtgctgaaggaaagagacttttaccctagaataatatatccagcaaaaataatcttaagacatgaaggagaaatgaagacattcccagacaaacaaacactgagacattttattaacactagacctgtactacaagaaatgctaaagaaagtacatcaatcagaaataaaaggatgttagtgagcaactaataatcacctgaaggtaaaaaaaaaaaaatcactgtaatagtaagtataaataaaaacacagaatattataagactgtaactgatgtgtcaactactcattctaagtatgaaggtgaaatgatgaaccaatcaaaaagttaactatacactgcacactatattaatgtgttatcagataaaataatgggtttttaaaaagtatttgcaagcctcatagtaacctcaaaccaaaatgcatacaatggagacacaagaaattaaaagcaagaaactaaatcatatcatcagagaaaatcatctcactaaaggaagacagggaggaaaaagaaggaaaacagaccacaaaaacccagaaaacaaataataaaatggcaggagtaaattcttaattaccaataataccactgaatataatggattcaactatttaatcaaaagtcatagagtggctagatgaattttaaaagcaaacccattgacttgtttcctacaagaaacacacttcccctataaagacacgtgtacactgaaaataaaaggatggaagaatatatcccatgtcaagggaaaccaaacaagagcaaaagttgctgcactgatatcagacaaaatatatttctagacaaaaactgtaacaagagacaaggtcgctatataatgataaaagggtcaatttagcaagaatatataacaattttaagtatatgtgcagtcaaccctggagcacccagatatatgaagcaaatattattagaggtaaagaaagagatagaccctaatacaataatagctggagacttcaccccactttcagcattaggcaaatcttttagacagatattaacaaaaaaactcaatctgcactatagaccaaatggatctaatagatatttacaaaacttttcacccaatggctatggaatataaactcttcagcacatagatcgttctcaaggatagaccatatgttaggtcataaatcaagttttaaaatattcaaaaaatggaaataatatcaaacatctactctgaccacaatgggataaaactagaaatcaataacaaggaattctgaaaaccatacaaatacattaaaattaaacaatatgcttctgaagaatcagtgggtcaatgaagaaaccgaaaaaaagttgaagaattccttgaaacagatgataatgaagacaccatctaccaaaacctatgaaatacagcaaaagcagtattatgaaagaagtttgtagctaaaaaaaaaaaaatctaacagtgtgcttgaactagaaaagcaagagtaaaccaaaaccaaaatcagtaaataaaggaaatactaaagatgacagcagaaataaatttgaaatgaagaaaacaatgcaaaagattaatgaaataaaaagtttgcagtttgagaagttaaacaaaattgacctttagctggactaagaaaaagagaagatccaaataaataaaatcagagatgaaaagggagacattatgactactacagacattaaaaggattactagtggctactatgagtaactatacgccaataaattggaaaatctagaagaaatggacaatttcctagacacatacaaccttccaatgttaaaccagtacgaaatccaaaacctgaacagaccaataacaagtagcaagatggaagccataataaagtccctcagtaaagaaaagcttgggacctgatgactttactgcagagctgtaccaaacatttaaagaagaattaataccaatcctatttaaacaattcaaaaaaaaaaatgaggaggggacacttcctaacttattctacaagaccagtattacattgatagcaaaactagacaaagatacatcaaaaaaattaaaaaaaaacacaagccaatatctctaatgaatattgatgcgaaaatcctcagcaaactactagcaaagcaaattcaacaatacattagaaagctcattcatcacgaccaagtgggatttattccagggatgcaagggtgattcaacatatgcaaatcaatcattgcgatgcatcatatcaacagaagaaaggacaaaatccatatgatcatttcaattgatgtcaaaatgatgttttcatcccttcatgataaaaatcctaaaaaaactgaggatagaaggatcatacctcaacataatacaaaccatatatgacagaccccagctagtgtcatactgaatgaggaaaaactgaaagcctttcctctaggacctggaacacaacagggatgcccactatcaccactgttattcgacatagtactgaaagacttagatagagcaatcagacaagagagagaaataaagggcatccaaattggaaaggaagaagtcagattatccttgtttgcagatgatattatcttttatttggaaaaacctgaagact

SEQ ID NO: 4893 - DNA, 4794 bp, Homo sapiens
  source 1..4794: mol_type = other DNA
ggattatggcagacaggagacagaactagattgcagctctgattctgacagacagagcagcatatggaggcttgcattatgaatttttgctccagaatgactacaggaataaatcaggaaacctgaaaggacccacagaccctctgaagaaagcagattgttcctgcaggacccaagagacaccccaaatactgtgagtgcccaaattgtggaagtgggaaaaagaccatctgcccctgaacacacaccccccactggggaaactgaaggtctagaataccgaagattctgatcttacctggagctgagtcaacttagagaaatgagtgaaatacaggggtaaaggaagcagcggaaaaagccctgtgagctcactgggttccctaacaagccatctctgcccggcctcacaggggtccttcaggagggtggccagaggcactgggaaaagaccacagggagaagggtatctccagctgaattttgtaatgatttgaactgatcaagaaatctcctggtcagaacttgggaaagggcatgaatccagtgagcagagtccacaggtggggcaagaaggaaagccatacttgctttcacagctgggaggcagatatgctggggcaagttatcagccctgctcgcccactgcctggaaacagactcggtgctgttgcggggtcacagtgggagtgagaccagccctttggattgtgtgggagctgggtgatgcctttgactgctgactttcccccacttccctgacagcctgcatgacacagcagagacagccataatcctcctaggaatataactccattgacctgggaatctcacccccatcttccacagcagctgcaataagacctgcccaaggaaaatctgagctcagacatgcctagctctaccctgacccaagagtcctttcctacccaccctggtaactaaagacaaaggacatatattcttgggagttctagggccacactcaccacctgttcctccccatactaccacacctgatgctctctggaaagtcccacttcccagcaggaggccaactagcacaaaaatagtgcattaaaccatcaaagctaagaaccatcacagaatccatttcacccccctgacacctctaccagaacaggtgctggtatccatggcttagagaaccacagatggtgcacatcacaggactctgtgtagacaaccttaagtaccagctcagagcctggtagacttgctgggtgggtagatccagaagaaagataacaaccactacagcttggctctcaagaagccacgtgcataggaaaaaggggagagtactatgtcaagagaacaccccatgggacataagaatctgaacaacagccttcagcgctagactttccctctgacagagcctacccaaatgagaaggaaccagaaaaccaactctggtaatatgacaaaacaaggttatttaacaaccccccaaaatcacactagcttaccagcaacggatccaaaccaagaaggaatccctgacttacctgaaaaagaattcaggaagtgagttattaagctaacctgggaggcaccagagaaaggtgaagccaaatgtaaggaaattaaaaaaaaaaaaaaaggatacaagaattgaaaggagaaatattcaaggaaatagatagcataaataaaaaacaataaaaacttcagaaaacaatggacacacttatagaaatgcaaaatgctcaggaaagtgtcagcaatagaatcaaacaagtagaagaaagggattcagagctcaaagtcaaggtctttgagctaatccaatccaataaagacaaagaaaaaagaataagaaaatatcaacaaacctgccaagaggtctggaattatgttaaacaaccaaacctaagaataatcagcattcctgaggagaagagaaatctaaaagtttggaaaacatatttctgggaataatcgagaaaaacttccctggccttactagagacctagatatccaaatatgagaagcacaaagaacacttcggaaattcattgcaaaaagatcattgcctaggcacattgtcgtcaggttatctaaagttaagatgaaggaaagaatcttaagagctgtgagacaaaagcaccaggtaacctataaaggaaaacctatcagattaacagcaggtttctcagcagaaaccttaccagctagaagggattggggccgtatcttcagcctcctcaaaacaattatcagccaagaattttgtatcaacaaaactaagtgtaatatatgaaggaaagatagtctttttcagacaaacaaatgtggagaaaattcgccagtaccaagccaccactacaagaactgctaaaaggagctccaaatcttgaaataaatcctggaaatacatcaaaacagaacctctttaaagcataaatcacacagggtatataaaacaaaaatacaagttaaaaagcaaaaacaaaaaacaacaacaacaaaaaacaaggtacacaggcaacaaataccatgatgaatgcaatggtacctcacatctcaatactaatgttgaaggtaaatggcctaaatgctccacttaaaagatacagaattgcagaatggataagaattcaccaaccaaatatctgctgccttcaagagactcacctaacacgtaaggactcacataaacttaaggtgaaggggtgggaaaagacatttcatgcaaatggacatcaaaagcgagcaggagtcgctattcttatatcacacaaaacaaaatttaatgcaacagcagttaaaaaaaacaaagagggacatcatataatgataaaaggtcttgtctaacaagaaaatatcacaattctaaacatatatgcatttaacactggagctctcaaatgtataaaacaattactaatagacctaagaaatgagatggacagcaacacaataacagtgggggacttcaatactccactgatagtactagacaggtcatcaagtcaaaaagtgaacaaagaaacaatggatttaaactataccctggaacaaatggactgaacagatatattcagaacattccatcaaacaaccacagaatatatatgttctattcaatagcacatggaactttctccaagatagatatatgataggccaaaaaacgagcctcaacaaattaaaaacaaattatatcaagccctctctcagaccacagtggaataaaactggaaatcaactccaaaagaaacctttaaaaccatgcaaatacatggaaattaaataacctgctcctgaatgatcatacggtcaaaaatgaaatcatgatagaaatttaaaaattctttgaactatatgacaattgtgacacaacctatcaaaacctctggaatacagcaaaggtggtactaagaaaaaagttcatagccctaaacacctacatcataaagtctgaaagagcacaaacatacaatctaaggtcacacctcaaggaactagagaaacaagaacacaccacgcccaaacccagcagaagaaaggaaataaccaagatcagagcagaactaaatgaaattgaaacaaaaaaaaaatacaaaagatagatgaaacaaaaagctggttctttgaaaagataaataaaattgatagaccactggcaagattaaccaagaaaagaagagagaaaatccaaataagctcaataagaaatgaaacaggagatattacaactgacaccacagaaacgcaaaagatcattcaagactaccatgaaacacctatgtgcataaactagaaaacctagaagagctggataaattcctggaaagatacaaccctcctagcttaaatcaggaagaattagataccctgaacaggccaataacaagcagcaagattgaaatggtaattaaaaacctaccaacaaaaaaaagttcaggacccaggcagattcaccacagaattctagcagacatccaaacaacaggtacaaatcgtattgacactattcaacaaggtaatggaaaagggaaccctctctaaatcattctatgaagccagtatcaccctaatatccaaaccaggaaagcacacaataaaaaagaaaactacagaccaatatccttgacaaacatagatgttaaaatccttaacaaatattagctaaccaaatccaacaacatattaaaaaggtaatccaccatgatcaattgggtttcataccagggatgcagggatggtttaacatacacaagtcaataaatgagataaaccacataaacagaattaaaaacaaaaatcacatgatcatttcaatagatgcagaaaaagtattcaacaaaatccagcatccctttatgattaaaactctcagcaaaattggcatacaaggggcctatctcagtgtaataaaagccatatatgactaactcactgagtggggaaaagttgaaggcattccctctgagaactggaacaagacaaggatgcccactctcaccactcctcttcaacatagtactgaaagtcctagtcagagcaatcagacaagagaaagaaataaagggcatccaaatcggtaaagaggaagtcaaactgttgctgtttgctgatgacatgattgtatacctagaaaaccctaaagattcctccagaaagctcctataactgataaaagaattcaacaatgtttctggatacaaaattaatgtacacaaatcagtagctctcatgtacaccaacagcgactaagctgagaatcaaatcaagaactcaacccccttgccaatagctgcaat

SEQ ID NO: 4894 - DNA, 3263 bp, Homo sapiens
  source 1..3263: mol_type = other DNA
gaagatggagcaagatggccaaccagaagcctctaatggtcatttcccctgagggaacaccaaattgaacaactatccacacaagaaacactttcataagaacaaaaaaatcaggtgagtgagcacagtacttgattttaacatcacatcaagtaaagaggcactgaaaagggtaggaaaaacagtcttgaactgctgacaccactcttccctgatcctccagcagtggctatgtggcactgagagagaatctctgtgcttgagagagggaaagcacagtgattgtgggactttacattggacatcagtgttgctctatcacagcagaaagcaacacagagaagaattcagccagtaccaatggagcgagcatttagttcagccctaccagaggggaatcacccatcccagcaattggaatttgagttctggctagccccaccactgaggcctaaagcactctggggtcctaaataaacttgaaaggcagtctaggctacaaggactgcaagtcttgatcaagttctggtgctgtgctgggcttggagccagtggatttggggtgcacatgacacaatgagacaactgccagggtggccaaaggaatgcttgcatcactactcccccaatcccaggcagtgcagctcccagctctaggagggaatccctcttttggcttgaggagaggagagggaagagtaaagaggatattgtcttataacttggatatcagctcagccacagtagagtagggcaccagggagagtccttaggcccccattccaggccctagctcctggatgacattgttagatacaccctgggccagaaggaaactcatttccttgaagagaaggacctggtcctgacaggattaatcatttactgactaaacagtccttatgccttgagtaaacatcagtggtacccaggaaatacttaccatgggcttcaggccttgggtgaaacccagggccttgttcacttcagatgtgaccagtgcattcccagatatggtgggcatgagaaactccttctacttgagaaaaggagagggaagagtaaaagagactttgtcttgcagcttaggtaccagcttggccacaggggcttaaagcacaaagcaggctctcgtggtccccgattccaggctttgacacttggcttccatttctggaacttccctgggccagaggaaggcctgctgccctgaatgtagagacctgagtctggcagcatccactacaagcttactgaaatttcagcctttgggctttgggcaagacccagggctgtgctggcttcaagtctgacccagtgcagtcccagtggtggtggccacaggggtgatttagtcctctctctcccagctacaggcagctcagcatggaatgaggggctccattttttgagtgaaagtaagggaagggagcaagggtctctgcctggtaatccagggaattcttctaggtcttactcaagaccaccaaggtggtacctctgagtctgcaagagtaaccacattaatgggtttgatgtgctccctaatgcacatatggctgcagtgaccaaagatttagatcataacactcaattccttttgaatacttggaaagtcttcccaagaagaatgggtacaaacaagcccagactgcaaggactacaataagtatccatctctttaatgccaagacattgatgaacatccacaagcattgcaatcatccaggagaacattaccttgccaaagaaacaaaataaggcaccagtgaccaatcctgcagtgacagagatatgtgacatttcagaaagataattcagaatagctgctttgctcaacaaaatgcaggataacacagagaagaagttcagaattctatcagataaatttaacaaagagattgaaataattagaaataatcaagcagaaattctgaagatgaaaaatttaattgacatactgaagatgcatcagagtttttaaatagcagaattgatcaagcagaagaaaaaaatagtgagcttgaagacaaactagttgaaaatacacagaggagaaaaagaaagaaagaagaaagaaagaagtatgcctgcaagatgtacagaatggactcaaaaaggcaaatttaagggttattggacttaaagaggtggtagaaagagagatagagttagaaaattattcaaagggataatattagcgaacttcccaagtctagaaaaagatgtcaatatacaagtacaagagggttatagaacaccacgcagatttaacccaaagaagactacctgaaactcccacaaatcaaggataaaagatcctaaaagcagtaagagaaaagaaacaaataacatacaaaggagctccattacatctgacagcagacttctcagtggaaaacttacaggccaagaaagagtggcatgacatatttaaagtgctcaaggaaaaaaattatcctagaatactatattcagtaatgatatccttcaaacatgaaggagaagtaaagacatttccacacaaacaaaaactgagggatttaatcaacaccagaactatcctacaagaaatgctaaagagaatttttgagtctgaaataagaggacattaacaagcaataggaaatcatctaaaggtacaaaactcactgataatagtaagtgcacatacaaacagagattattataatgttgtaagtgtggtgtgtaaactactcatgccttgagtggaaagaatagatggttaacatatagaaataataaatacaacttttcaagacagagagagtataataagacataaagagaaacaacaaaaagttaagaagcattggagggtggactgaaagtatagagtttttattacttttctccttgttagtttgctttcacaatacatgctaggtgtcatcagtttaaaacaataggctataagatgttatttgcaagcctcatggtaatctcacatcaaaaaatccaacagattcgcaaaaaataaaaagcaagaaactaaatcatatcaccagaaaaagtcaccttcacaaaaaggaaaatgggaaggtaaaaaggaaaaaagagaagactacaagaaacaaaaaataacaaaatgggaggagtaagtccttacttatcaataataatgttgaatataaatggactaaactcttcaatcaaaagacagtgtggctgaatggattaaaaacaagacccagcgatctgttgcctacaagaaacacacttcaccaataaatacacacatt

SEQ ID NO: 4895 - DNA, 1557 bp, Homo sapiens
  source 1..1557: mol_type = other DNA
aactttctattctttgatcgcaatttctcatctctttctagtgctttcgttcatgttaatccttctgtacttgtcctgttacctcacagagacctctaatccccagacctctgcattttctccccatctatcagcttatttctgttgtgacttttttctgtatccagcaatgaactcattttctatcacttgaaccatctttggctagtactcctaaactcccttgctcccttctccgtctgccatacctgcctaaaaaccgtaacctggaataatgtaatgtaactgtctctctgtcttctgggcttcaattttgcttctgctgcttactagcagagtggacatctctgtattggggcagcccaacactggtaaagaagatttcacaactgtccaggttggaaccactgtgattccatgttctctaacataagctgagatgtcatgatactggtgatccttcagcatggccttctacagtcttctttcctgtttcctataacaactatttcagaccttccccagtctccccaagatttctatcccaggtatctcctgccctccttctccctcatcaggtaacatcattcctttctcaaaaagaaaaaagaagacattaggtaggaagtccttcaaggatgtccaccttctaaggaggtctgcatctgtgttaccttctgtttgagtggaagaggtgtcttttctctggtcagtggctaattcttccatgtgaatccttgatctcatctcttcctattctttatggactttcccccatgatttatctttttagttgactatattttctacctctttttaattgactatattttctatctttttaactgactgtattttctacctctccatccatattgggtcttttccctaagtgtaaacatgctcaggtgtctcccttattaattccaaatccaaacacgtacccatccaccctcacacatatgcaaaacagtgctccctcaacactgtgtccctctggctgtgattccgttttcttcccttgatagctaagctccttgaaagagtagtttatcctctccatatctactccctagtctcctgtttactcttgaatccattggccactggcttctatccattccatacaactgaaatttgtctcacagtgtcttcaatgactttccagttgctgaattcagggtacgctttttggtcagtatcttggctattgctttgaagctgctaactatctcctcctgctggaaactttgctgcttggtttctaggatactgttctcttttggattttcttttaccctttgtccacccctatcagtccctttcgtgggcttttctttctttgactgtctcttataaagtttaacattttataaggctttgtctttgactttcgtacatgctctccctggggatccactcccatggttttacctaccacctatatactgacgcctcctaaattgacctctctgtatccttctcctaagcactatactttcatatcccattgccttcggagtctttttgcttaagtatctcacaggcagtttaaac

SEQ ID NO: 4896 - DNA, 277 bp, Homo sapiens
  source 1..277: mol_type = other DNA
tcctctatgtcctcagcctctctctagaacagcttttttcctttggctctcccctgtgaataatgtggtcctctccaatagagaggctgttcctgctcccacaccccacagttcctcaggatggtatcggtattctcctagttcacccactgccacttctaagctactgcttctccactgtcatgtataaagctcttcctttgaagcctaagctgtcttgcagttttatcctccacccattctgtttcctgttaatctgttcatcattgggtggctc

SEQ ID NO: 4897 - DNA, 300 bp, Homo sapiens
  source 1..300: mol_type = other DNA
aagccagtcccaaaagaccgaatattgtagaattccatttatatgaaatgaccagaataagcaaatctacagagagagaaatagattagtggttgccaggggctcggggatggggtgggcactgggagaaaatgagaggtgactgctcaagggtacagggtttctttttggggtaacgaaatgttctaaaattgactgtggtcacggttacacaactttgtgaatacactaaaaaccactaaattgtacccttaaaataagtgaattgtaaggtatgtgaattatatctcaataatgtta

SEQ ID NO: 4898 - DNA, 160 bp, Homo sapiens
  source 1..160: mol_type = other DNA
agccaggcatggtggcccacacctgtggtcccagctactcaggaggctgaggtgggaggatcatttgagcccaggaggtcaaggctgcagtgagctgtgatgacaccactgcactccaacctaggtaacagagagacacctctgtctctgaaaaaacaaa

SEQ ID NO: 4899 - DNA, 130 bp, Homo sapiens
  source 1..130: mol_type = other DNA
ccatggacgagcaatttaacatcctgaagcctcatgggaacaacagtgacaacagtacctacctcctagggttgttgagaagatgcactcaaacgacacgggaaaagtgtttcatcacagtgccaggctc

SEQ ID NO: 4900 - DNA, 157 bp, Homo sapiens
  source 1..157: mol_type = other DNA
ccgggcacggtggctcacacctgtaatcccagcactttgggaggctgaggcaggagaattgcttgaagtcaggaggcagaggttacggtgaaacaactgccattgcactccagcctggacaacagagcgaaactccatctcaaaaaaaaaaaaaaaa

SEQ ID NO: 4901 - DNA, 309 bp, Homo sapiens
  source 1..309: mol_type = other DNA
gccgggcacggtggttcatgcctgtaatcctagcactttgggaggctgaggcgggtggatcaactgaggtcaggagtttgaaaccagcccggccaaaatagcgaaaccccgtctctactaaaaacacaaaaattagccaggtgtggtggtgcatgcctgtaatcccagctactcgggaggctgaagaaggagaattgcttgaacccaggaggtggaggttgcagtgagccaagactgtgccactgcactccagcctgcacaacaggagcaagactccatctcaaaaaaacaaaaaacaaaaaacaaaaa

SEQ ID NO: 4902 - DNA, 289 bp, Homo sapiens
  source 1..289: mol_type = other DNA
gccgggcgtggtggctcacacgcctgtaatcccagcacttcctgaggtgggtggatcacgaggtcaggagttcaagaccagcctgaccaatatggtgaaaccctgtctctactaaaaatacaaaaattagccaggtgtggtggtgcacgcctataatctcagctactcgggaggctgaagaaggagaattgcttgaacccgggaggtggaggttgcagtgagccaagatcgtgccactgcactacagcctgcacaacaggagcaagactccatctcaaaaaaaaaaaaa

SEQ ID NO: 4903 - DNA, 299 bp, Homo sapiens
  source 1..299: mol_type = other DNA
gttgggcacggtggctcacgcctgtaatcccagtactttgggaggccaaggcgggcagatcacgaggtcaggagttcaagaccagcctgaccaatatggtgaaaccctgtctctactaaaaatacaaaaattagccgggcgtggtggcacgcgcctgtagtcccagctacttggaggctgaggcaggagaatcgcctgaacctgggaggcggaggttgcagtgagccaagattgcgccactgcactccagcctggcaacagagtgagactctgtatcagaaaaaaaaaaaaaaaaaaaa

SEQ ID NO: 4904 - DNA, 970 bp, Homo sapiens
  source 1..970: mol_type = other DNA
agggtcagcttcaggggcatgtgatgtgcatagagccttgccctcagaagggcctgaagcttggtttaatactctgatggcactgtcttgaaattcttaatcattttatcttcgaacctgtgttttcaagtgaagtccaacgggaccatgatgcacgcatgtgagcaaaggagctacgtgctccttgccacctcatttgcataccacattcatgatgtcccatgagctcagaattcttgtgaatccctggtgcatggggagttcaataaggactcaaagtccgtaaaaggtaagcatgttccatctatgactaagtaagcactggtgtgaacagtcctaaaggtcacactttctgttctaagctcaacttgcttcaaatgcagaaagaaggtactggagttctaagagacatgaatgaccaaggaacctgaccatatccttccttactcctgttacttccctgtattggccaagcacttaaactgaaaataatccagaaggaaagggaaagatagggcaaccgagttccttttcctttcagttcttccttacttactagcaagccacagggagggagtgttgaggatgtgctaatatcaataagtaaaatcaaaacaattgagttaactttgtgcagcatttccactgttctagttcgtataaaatacacgtatgtactagctacaaaatacaaattgtgtgtcagtgatcccacatacatggcaaatggtcttaaacttgcatctaaaatttgcactgtacaattgaaggatggttggtaagattcacactaataatttaaaatgacattaagttgcaaacaaaaatgtcttgacaaatcgagagagaaactggaagaaagggaaacgtttttattttagtatcgtgaatggcccttttttcctgccttttgaacaactggcctgcattttcattttgtacctggctctgcaagttcagaagctggccc

SEQ ID NO: 4905 - DNA, 308 bp, Homo sapiens
  source 1..308: mol_type = other DNA
caggcacagtggcatacatctgtaatcccagcactttggaggccaaggcaggcagatcgcttgagcccaggagttcaagaccagcctgagcaacatggcaaaatcccatctttacaaaaaaaacccctgaaaattagccaggcatggtggtacatttctgtagtcaaagctacttgggaggctgaggtgggaggatcacctgagcctagggaggttgaggctgcagtgagctgtgatcatgccactacaccccagcctgggcattagagccagactctgccaaaaaaaaaaaaaaaaaaaaaaaaaaa

SEQ ID NO: 4906 - DNA, 58 bp, Homo sapiens
  source 1..58: mol_type = other DNA
tgggttttaacaagcccctcaagtagttctgatgctccctcatgtttgtgagccactg

SEQ ID NO: 4907 - DNA, 61 bp, Homo sapiens
  source 1..61: mol_type = other DNA
catggattacatgttaacataatattttgaatatatagggctcataagatatattattaaa

SEQ ID NO: 4908 - DNA, 121 bp, Homo sapiens
  source 1..121: mol_type = other DNA
aatagaggttatttttagatggcaacattatggggaattttgattttttttcctgtttgaatatgtatttttccagttttctacaaagaacatatactatgattttataattaaaaaacaa

SEQ ID NO: 4909 - DNA, 315 bp, Homo sapiens
  source 1..315: mol_type = other DNA
ggccgggcgtggtagctcacgcctgtaatcccagcactttcggaggccgaggcgggtggatcacctgaggtcacaagttcaagattagcctggacaacatggtgaaaccccgtctctacaaaaaaatacaaaaaaaaattagccaggcgtggtggcaggcatccgtagtcccagctacttgggaggctgaggtggagaatcacttgaacccaggaggcagaggttgcagtgagccgagattgcaccactgcactccagcctgggcaacagagcaaaactctgtctcaaaaaaataaataaataaaataaagaaaa

SEQ ID NO: 4910 - DNA, 312 bp, Homo sapiens
  source 1..312: mol_type = other DNA
ggccaggcacggtggctgatacctgtaatcccagcactttgggaggcggaggcgggtggatcacctgaggtcaggagttcgagactagcctggctaacatggtgaaaccccgtctctactaaaaatacaaaaattagccgggtgtggtggcacgcacctgtcatctgaggtactcagggggctgaggcaggagaactgcttgaacccgggaggcggaggttgcagcgagccgagattgcgcccttgcactccagcctgggcaagaagggcaaaactccgtctcgaaaaaaaaaaaaagaaaaaagaaaacaa

SEQ ID NO: 4911 - DNA, 258 bp, Homo sapiens
  source 1..258: mol_type = other DNA
ttcagggggaaagggtcaccttaaaaataaattattttcagggactttgggaatctaatgataaatattacacataatctatgaatagcttaatcctttatatattccttaaaataggaattcctcgacatcactcctggccacactttccttgcctgtgttgttgctatgtgtatttgaaagtaatatctgcattccttttaagatgttctgtaagtcatatttgtcagttatacagagtagtcttccttttcccca

SEQ ID NO: 4912 - DNA, 90 bp, Homo sapiens
  source 1..90: mol_type = other DNA
acaggttcactatgcaaaactcaaatgagaatgtgtgaacgttctttgcaaactgtaaggtgctgtgcagatgttgttagctattgctat

SEQ ID NO: 4913 - DNA, 639 bp, Homo sapiens
  source 1..639: mol_type = other DNA
ctgcagaggaaagaaaagaaaccaaaaggatggtgggagtgtaaactagttccaccattgtggaagtcagtgtggcgattcctcagggatctagaactagaaataccatttgacccagccatcccattactgggtatatacccaaaggactataaatcatgctgctatacagacacatgcacacgtatgtttattgcagcactattcacaatagcaaagacttggaaccaacccaaatgtccaacactgatagactggattaagaaaatatggcacatatacaccatggaatactacgcggcccataaaaaaagatgagttcatgtcctttgtagggacatggatgaagctggaaaccatcattctcagcaaactatcgcaaggacaaaaaaccaaacaccgcatgttctcactcataggtgggaactgaacaatgagaacacttggacacaggaaggggaacatcacacactggggcctgttgtggggtggggggagggaggagggatagcattaggagatatacctaatgtaaatgacgagttaatgggtgcagcacaccaacgtggcacatgtatacatatgtaactaacctgcacgttgtgcacatgtaccctagaacttaaagtataataaaaa

SEQ ID NO: 4914 - DNA, 189 bp, Homo sapiens
  source 1..189: mol_type = other DNA
agaattagccaagaagaaaaaagtaaaaaaacaaaaacaaaacaaaacaaaacaaaaaaaagagaaaagaaaaaagattacacattctgtacacagctaacaacaacaaaaaagggacaaaaccccacacgctaaaattacaatgaaagtgtgaacttcaccaattgcaacctaaaaaacacaacaaat

SEQ ID NO: 4915 - DNA, 75 bp, Homo sapiens
  source 1..75: mol_type = other DNA
agggaggccagtgctggggatgaggacaaaggcctacgcccagtcccagctctgacactgccttgctgagtcacc

SEQ ID NO: 4916 - DNA, 61 bp, Homo sapiens
  source 1..61: mol_type = other DNA
tttagtcgtcagggaaagcttcgactgcaaaaatggtatgtcccactatcagacaaagaga

SEQ ID NO: 4917 - DNA, 212 bp, Homo sapiens
  source 1..212: mol_type = other DNA
agagcatggatcctggggtcaaagggcctttgcccccacccttacttggccctctacctgcaggtgaccactggcacattctcctgcttgtctcagcttcaggttcttcacctctaagatggggatgatgaaaacagtacctgtcatgcagaattgttgggaggattgataatttagatgtttatacatgtaatgtacttagatcagtgtct

SEQ ID NO: 4918 - DNA, 277 bp, Homo sapiens
  source 1..277: mol_type = other DNA
ggcgttggcccagatccagaaatttttactgagaaaatcttgaccacgcctagattctcaacccattatcttggtgcatgcggcttcatatccatgcatgttctctggttaggttccttaatttttttttttttttaaagaggccttctacccctgctcagatgtcaaaatgtttgggttggcgcttaatccacatgtcagctgcaagctcttatttaccaaagaatagaattgttaattctattgtcaaaatattagtaacagtttagtcgtaaga

SEQ ID NO: 4919 - DNA, 122 bp, Homo sapiens
  source 1..122: mol_type = other DNA
gtcagatgtggtggtatgcacccatagtcccagctactcaggagactgataggggaggatcacctgagcccaggagttcaagaccagcctgggtaacatagccagactttgtctctacataa

SEQ ID NO: 4920 - DNA, 311 bp, Homo sapiens
  source 1..311: mol_type = other DNA
gccgggcatggtggctcacgcctgcaaccccagcactttgggaggccgaggagggcagatcaccggaggtcaggagttcgagaccagcctggccaacgtggtgaaacctcgtctctactaaaaatacaaaaaattagccaggcgtggtggcacgcgcctgtagtcccagctattcaggaggctgaggcaggagaatcgcttgaacccaggaggcagagattgcagtgagctgagattgtaccactgcactccagcctgggtgacagaacaaaactccatcacaaaaaaaaaaaaaaaaaaaaaaaaaaaaa

SEQ ID NO: 4921 - DNA, 174 bp, Homo sapiens
  source 1..174: mol_type = other DNA
accttaaaacaaaatagaaaagatcttaccatctgacccagcaatccctattattgggaataataatggaatataaatcattttactataaagatatatgcatgcatatgttcatcatagcactatgcataatagcaaaacatggaatcaacctaaatgcccatcaatggtaga

SEQ ID NO: 4922 - DNA, 260 bp, Homo sapiens
  source 1..260: mol_type = other DNA
ggtggccgggcgtggtggctcacgctgaggtcaggagttcgagaccagcctggccaaccaacatggtgaaacctcgtgtctactaaaaatacaagaaactagccagatgcggtggcacccgcctgtaatcccagctactcgggaggctgaggcggaagattcgcttgagcccaggaggtggaggttgcagtgagccaagactacgccactgcactccagcctggaggccagagtgagactccgtctcaaaacaaaacaaa

SEQ ID NO: 4923 - DNA, 288 bp, Homo sapiens
  source 1..288: mol_type = other DNA
ggtcgggggcggtggctcctgtctataatcgcagcactttgggaggccgaggtgggcagatcagctgaggtcaggagatcgagaccagcctggccaacatggcgaaaccccgtctctactaaaaatacaaaaattagccaggactgatggcatgtgcctgtaatcccagcttctggaggctgaggccagagaatcgcttgaacctgggaggtggaggttgcagtaagctgagatcgctgcactccagcctgggcgacaagagcgagactctctcaaaaagaaaaaaga

SEQ ID NO: 4924 - DNA, 387 bp, Homo sapiens
  source 1..387: mol_type = other DNA
tgatatggtttggctctgtgtctccacccaaatatcatgtcaaattgtaatccccagtgttggaggaggggcctggtgagaggtgattaaatcgtgggagtggacttccttcttgctcctcttgtgatagtcagggagttctcatgagatctgatggtttaaaagtgtgtggcatctccccactcactccttctttctctcctccatcaccatggtaagatatgcttgcttccccttcatcttctgtcatgattgtatgtttcctgaggcctccccagccatgcctcctgtacagcctgcagaaccatgagccaattacacctcttttctttataaattacccagtctcacatagttctttatagcaatgccagaacaaacaaatac

SEQ ID NO: 4925 - DNA, 86 bp, Homo sapiens
  source 1..86: mol_type = other DNA
ccagctattgacagctattcaccatttggtttctgtgtgtcccagtcctcacgtggaaaatgggcaaatattatctgcttcatcgg

SEQ ID NO: 4926 - DNA, 49 bp, Homo sapiens
  source 1..49: mol_type = other DNA
cccataataggcatctgataaatgtttgttccacatggaatgagtgaat

SEQ ID NO: 4927 - DNA, 133 bp, Homo sapiens
  source 1..133: mol_type = other DNA
ttccctgataccctcatcccaagccaaggtttggtggctctgctctggccctgtaatatctactgtcaatttatatggtcattttgtttactttcctgtatgtctcactaaattgtgaactgcaggccaggaa

SEQ ID NO: 4928 - DNA, 239 bp, Homo sapiens
  source 1..239: mol_type = other DNA
agtgttttttcaaaatggtcgtgacctattagtgggccagaaaatcaattcagtggatcacgatcagcattttaaaagaatgcattatcaaaaaggtgtgtgtggaatctaagtggatagaacaaggactgcttcaccagacatctatttctgttacacggtatatatggagtatcgggtcacaatgtcaaaagtatttctaactatggagctcaggaaaaaaaaggctaaaaaacact

SEQ ID NO: 4929 - DNA, 3276 bp, Homo sapiens
  source 1..3276: mol_type = other DNA
agagggtcagagcaagatggtggaatacaagccaacaccagtcaccccctctccaggaacacgaaatttttactatctgcacacagaaaagcactgttacaaaaaccaaaaatcaggtgagcaatcacagtacttggttttaacttcatatcactgaaagaggcattgaggagggcaggagaggcagtcttgaatccctgacaccacccctcccctgccaccccaacagaggccctgcacttaagggagggagagaatagtgactgggggactttacactgaactcagtactgccctgtcatagtggagagcaaagctgtgctgggccagagggagcatttggaccagccttggctagagaattgcccatcgcagcggttggaacttgagtttctcagcaagccttgctaatgttggccaaagtactctggagtcctaggtaaacatgaaaggctgtctaggacacaagcactgcaattcctaggcaactcctagtgctaggctggactcagagccagaggactaggtggcacatgacctagggatacacccgctggggggcctaagggagtgcttccaccacccttccacaaaccccaggcagcgcagcttttgacaacaaaagagactccttccttctgcttgaggagaggagagcaaagagtaaaaaggactttgtcttgcatcttggataccagctcagccacagtaggacagggtaccgggcagagtagtgaggcccctattcgaggctctagctcacagatgacaaagacacaccctgggccagaagggaacctgctgccttgaaggaaaggacccagccctggcaggattcatcgcctgctgaataaaagagcccttgggccctgaataaccagcggcgatacccaggtagtatgccgtggaccttgggctctgaaatgtgctgacttcaggtgtgaccaagcacattccgagctgtggtggctatggtgaaagactccttctgttagagaaaagcagggggaaaagtaaaggggactttgttttgcaccttaggtaccagctcagccaaagtgcggtagagcaccaagcaggctcttggggtccccaagtccaggcctaggctcttggactgcatttttggacctccccagagccagagggaagcccactgccctgaaagatgagtcccaggcctggcagtattcaccacaagctgactgaagaacccttagattttaagtgagcatcagtggtggccttgcagaacccctcccatgagccggtgatggccaaagggggaggctcctctgcctgtggaaaggggagagaaaagcaggaaggaattcgtattgtggtttgagtgccagcttagccgcagtaagaaaagaatatcaggcaaattactaaggtttttgactctaatccctggccaccagacagcatctctgggctcacccaaagcctggggaaacttgccatcccaaaaaacacaaacctgactggcttcgccacctgctgatcatagagccctagggcctggagtgaaggtaagtggtagccaggttaccagtgtaaccagtggttacactgagccttgggcaagacccagtgctgtgctgacttcaggtctgagctggtacagtcctagtggtggtggccatatgggtgcttacatcaccatacccccagttccaggtggctcagcacaaagagcaagactttgtttgtttggaagaaactaaggaaaaagaacaagagcctttggttggtaatccagagaaatcttccagatcttatccaagaccatcaaggcagtacctctatgagtcggcaaaaaccacagcattattgagcttggggcctaagtacctttgaatatctagaaagcctcctcaagaaggacagacataaacaggcccagactgcaaagactacaataaatacctaactctttgaggcccagatctaaaagcatcaagatcatccaggaaaacaggacctcaccaaacgaacaaaagaaggtaccaggaactaatccaggagaaacagagatatgtgacctttcagacagaaaattcaaaatagctgttttgaggaaactcaaagaaattcaagaaaacacagacaatgaattcagaatcctatcagataaatttaacagagattgaaataatttttttaaaaatcaagcagaaattctagagttgaaaaatgcaatcggcatactgaagaatgcatcagaatctcttaataacagagttgatcaaccagaagaaagaattagtgagcttgaagacaggctatttgaaaatacacagtcagaagagacaaaagacaaaagaacaaaaaagaatgaagcacacctacaagatttagaaaacagcctcaaaagaacaaatctcagagttactggccttagagaggaggcagaaaaagagagataagggcagtaagtttattgaaaaggataacaacagaaaacttcccaaacctagagaaagataccaacattaaagtacaagaagattatagaacaccaagcagattcagcccaaagacgactcaaggcatctaataatcaaactcccaaaggtcaaggataaagatgggatcctaaaagcagcaagagaaaagaaacaaataacatacaatggtgctctctaatatgtttggtaggagacttttcagtgaaaaccttacaggccagaagagagtggcatgacatatttaaagtgctgaaggaaaaaaacttttaccctaggatagtatatccggtggaaacatccttcaagcatgaaggagaaataaagactttctctgacaaacaagatgagagatttcatcaacatcagacctgtcctacaagaaatgctaaagggagttatttaatctgaaagaaaaatatgtcaataagcaagaagaaatcatctgaaggtacaaactcactggtaatagtgagcacacagaaaaacacagaatattataacactgtaattgtactatgtaaactactcctatcttcagtagaaagactaaatggtaaaccaacaggaaatcgtaactacaacaacttttgaagatacagaacttttgaagacaataagaactaaagagaaacaaaaaagttaaaaaggagggagataaagttaaactgcagagttttcattagttttctttttgtgtgtttgtttatgcaatcagtgtcaagttgtcatcagtttaaaataatgggttaaaagacagtatttgcaagcctcatagtaacctcaaatcaaaaaccatacaatg

SEQ ID NO: 4930 - DNA, 177 bp, Homo sapiens
  source 1..177: mol_type = other DNA
caacctaagaacaaatgtaaaagtaaagatgcaggaaaaatgaattgcttggtattcattacttcatctgtatcaagcacagcagtaaaacaaaaacccatgtatttaactttttttttttaggttttttgcttttgtgattttttttttgatacttgcctaacatgcatgtgctgt

SEQ ID NO: 4931 - DNA, 154 bp, Homo sapiens
  source 1..154: mol_type = other DNA
atttgtgttctagtcccccagataccagtggcttattgtggctcttaggtaattaagttccacctctgtgggcttcagtttgctcaactctaaaacagaaggtgaggactaaatggtctttactgtctttcagctgtaacaatacagtattcta

SEQ ID NO: 4932 - DNA, 295 bp, Homo sapiens
  source 1..295: mol_type = other DNA
gccgggtgcagtggctcatgcctgtaatcccagcactttgggaagctgaggcaggcggatcacttgaggtcaggagttcaagaccaggctggccaacatggtgaaaccctgtctctactaaaaatacaaattagctgcgtatggtggcatgtgcctgtaatcccaactatttgggaggttgaggcaggagaatcggttgaacccaagaggcggaggttgcagtgagccaagattgtgccactgcactccagtttggatgacagagcaagactctgtctcaaaaaaaaaaaaaaaa

SEQ ID NO: 4933 - DNA, 534 bp, Homo sapiens
  source 1..534: mol_type = other DNA
tgaatcatccttttgtccagtattatatccatgctgtatatgctacccgcccactagtcccttagctgtctcagttgtcagattgactgtcatgggattgcagtgcttgcattaaagctacccttattgtataatgaccccaaagtgcaagagtagtgatgttggcaatttgcatacaccaaaaataagttataaagtgcttccttaaagtgaaatggttaaagttcttgacttaataaagaaaaaaaatgtatgctgaggttgttaagatttacagtaagaatgaatcttctatccaagaaattgtgaaggaggaaaaagaaacttgtgctagttttgctgtcacatctgaaactgcaaaagttgtggccacagtgcatcataagtgctaagacgaaaaagacattaaatttgcggatggaaggcgtgaatagaaatgggttctgacagcaatcaggttcggtactattcacagtttcaggcatccgctagggatcttggaacatatcccccatggataagggaggggtactg

SEQ ID NO: 4934 - DNA, 315 bp, Homo sapiens
  source 1..315: mol_type = other DNA
ggccaggcgcggtggctcacgcctgcaatcccagcactttgggaggccgaggcaggtggatcacctgaggtcaggagttcgagaccagcctgggcaatatggtgaaaccccatctctactaaaaatacaaaaaattagccaggcgtggtggtgcatgcctgtaatcccagctactcgggaggctgaggcaggagaatcgcttgaacccaggaggtggaggttgcagtgagctgagatggcgccactgcactccagcctggacgacatagtgaaacaattctgtctcggaaaaaagaaaaagaaaaagaaaacaag

SEQ ID NO: 4935 - DNA, 158 bp, Homo sapiens
  source 1..158: mol_type = other DNA
aaaaaaaaaaaaaaaaaaggaacagaaaaacctggacaaatagaaagtacagaatgagataataaaatcaaattcaaatagtttattatcatgagaaatgtaaatggaccgaatttaccagttaacagacaggattgtaacacttctaattacattcc

SEQ ID NO: 4936 - DNA, 92 bp, Homo sapiens
  source 1..92: mol_type = other DNA
ttttattcgtattcatcacatcggagatcatctcttcctaggaagcttttaaaaaatccccaggttggattagggcactccctctgggtccc

SEQ ID NO: 4937 - DNA, 271 bp, Homo sapiens
  source 1..271: mol_type = other DNA
acttgtggaaatagtctggcatcacctgaagaagttagagacatgcaaatcctacgtcctcagattcccctctgagagtctgcgtgcctatgtgaaccaggagacatgtgcgggagtgaacactgcagtgttactccaaacagcaagaaccagaaacagcccaaagggccgttacaggagaatatggacacccaggctgcacatgcacaccatggaatgctgtatggcagtggaaataaatgaacagctacccctacaggcaaacaggaat

SEQ ID NO: 4938 - DNA, 193 bp, Homo sapiens
  source 1..193: mol_type = other DNA
gcagagggacaagaatgtgcactcatgcccggtctgcctggcttacaatcctggctctctgcttgccagctagaactatcatgcaaatcatttaaccactcggtgcctcagttccctcatatgtaaaatggacatggtaacagtgtgtatcccacaggccattatgaggatttaaatgatttaaaggattgtg

SEQ ID NO: 4939 - DNA, 154 bp, Homo sapiens
  source 1..154: mol_type = other DNA
aggaacagcaaataaatttatcttgcatgccactttcagtcaacaggatgtggctctctagatagctgtgtttagaaggaatctgaggcttcagcctcacacaggggaaagactactgcgattgatagcaatatctgtgaacataagaaagaag

SEQ ID NO: 4940 - DNA, 152 bp, Homo sapiens
  source 1..152: mol_type = other DNA
gagcatgagctctggggacagacagttatgggttctggtcccactttttatcacttactagttgtttgaccttgggcaagtcatttgaccttctgtgcctcagtttcctcatctgtaaaatggggctaacaatattacctacctcataggat

SEQ ID NO: 4941 - DNA, 255 bp, Homo sapiens
  source 1..255: mol_type = other DNA
tccactcctagtgcctgaccaaatcctaccaatttgtcaaggtctagcttaaatgtgacctccaggaagcctagaggggatcacccacttctcaaattcaaagtacatatgacattcagctaactatagtcattcatgaacccactgtatctccttactaggagggtagagatcatgtctgattcaactctgtattccaagcacagagcctgacaaatagagggtgttcggtatgtgtctgatgaatacataaat

SEQ ID NO: 4942 - DNA, 1683 bp, Homo sapiens
  source 1..1683: mol_type = other DNA
aggagctcctaaaggaagtactttagtaaaaacacactgaagtatacagaccagtgacactatgaagcaaccatataaacaagtctacaaaataaccagctaccatcatgatgacaggattaaattcacacgtaacaatattaaccttaaatgtaaatgggctaaatatgccccaattaaaagacatagaatggcaagctggatagagtcaagacccatcagtatgctgtcttcaggagacccatcttaagtgcagacacacataagctcaaaacgaagggatggagggaaatttaccaagcaaatgaaaaacagaaaacagcaggggtcacaatcctagtttctgacaaaacagactttaaatcaacaaagatcaaaaatgacaaagaagggcattacataatgataaagggttcaattccacaagaagacctaactatcctaaatatatatgtacccaatataggagcacccagattcgtaaagcaagttcgtagagacctacaaagaaacgtagactcccacacaaaaatagtgggagactttaataccccactgacgatattagacagaccatctagacagaaaattaacaaagatattcagaacctgaactcagctctggatcaagtggacctgatagatatctacagaaccctccacccaaaaaacaaaatatacattcttctcatcaccacatggcactttaaaattgatcacataatcggaggtaaaacactcctcagcaaatgcaaaagaactgaaatcataacagtctctcagaccacagcacaataaaattagaactcaaaactaagaaattcactcaaaaccacacaactacatggaaactgaacaacctgctcctgaatgactcctgggtaaataatgaaattaaggcagaaatcaagaagttctttgaaactaatgagaacaaagagacaatgtatgagaatctctgggatgcagctaaaccagtgttaagaaggaaatttatagcactaaatgcccacatcaagaagctagaaagatctcaaaattcacaactaaaagaactagagaaccaagagcaaacaaatcccaaagctagcagaagacaagaaataaccaagatcagagctgaacggaaggagacagagacacgaaaaacccttcaaaaaaacaaaaaatcaacaaattcaggagcttcttttttgaaaaaattaataaaatagatagaccattagctagactaatgaagaacaaaagagagaaaatcaaacagacacaaccagaaatgataagggagatatcaccactgactccacagaaatacaaacaaccatcagagaatactataaatacctctatgcacataaactagaaaatctggaagaaatggatgaattcttggacacatacaccctccgaagaatgaactaggaaggaactgaatccctgaatagaccaataatgagttcagaaattgaggcagtaataaatagcctaccaaccaaaaaaagcccaggaccagagagatttatagctgaattccactacaggtacaaagaagagctggtaccatttctactgaaactattccaaaaaattgaaaagaagggactcctccctaactcattttatgaggccagcatcatcctgataccaaaacctggcagagatacaacaaaaaaagaaaacttc

SEQ ID NO: 4943 - DNA, 136 bp, Homo sapiens
  source 1..136: mol_type = other DNA
cagaaatggcaaatagatttaatgcagagtgtcaacttcaattgattgatagtggctgcctagagtgctgtgttgagtaggtttctgaggatgcaccctggcttgaagagaaagactggcaggattaacaatatct

SEQ ID NO: 4944 - DNA, 125 bp, Homo sapiens
  source 1..125: mol_type = other DNA
gaggcatttcccaacatggaagagacctctctagcacatggggcagtctcaatgaagtgaagaaagtaatgagcacatggccactagaagcaagcagttaagaccagatgcctctttgtcaggga

SEQ ID NO: 4945 - DNA, 2690 bp, Homo sapiens
  source 1..2690: mol_type = other DNA
gcacccttgccacctccatcacaagcatgtatgcacggaccctgccatgccactgctgccaacagatgtgagtaccatgctgccactatcctgacaaagaacttctgcagacaccctccactggagtgctcttgccagcaaaccaggaacacctcagctcctccagcagagcaggtgttcaacctgtaggggccagagaaaaaagctgtgggcctggtaccagcccccagaattagagtatgcagcccaagaatgctgcgctaatccttcgaccccagaaatcattcagaaacgaagcctgtcaactaaatccaacttatacgacagtcaaaccctcaagggcatcaaataatgcaaaagcaaaaagccctatctaaaggacataaacttcaaagattaaaggaacatcatcccacacagatgagaaagaactagcataagaattctgatgactcaaaaagacagtgtttgtttacctccaaacaaccacactagctcctaagcaatggctctaaaccagactaaaatgtctggaatgacaaccataagattaaaagtttggatggcaacaaagattatcatgattcaagagaaagttaaaattgaatccaaaagaatctaaaaaatccagtaaaacaatacaagagctgaaaaatggaatagccactttaagaatcaaattgatctgagagagctgaaaaactccctacaagaatttcataatacaatcagaagtaataccagcagaatagaccaagctgagaaaagaatcccagccctcgaagacaggctcttcaagtcaactcaataagacaaaaataaagaaaaaataattttaaaaagtatgaaccaaatcaccaagaaatatgggattatgtaaagagaccaaacttatgactcattggtgtccccgaaagagcaagcaacttacaaaaaatatttaagaatattgtcagtgaaaatttccgaaacttactagagagggagacattcaaattcaggaaattcagacaaaccctccaagatactatgcaggatcatcaagactcatagtcatcagattctccaaggtcaacaagaaagaaaaaaatattaaaggcagctagagagaagagagaagtcaccttcacagggaaccttttacaataacagtggaagtttcagcagaaatcctacaagccagaagacattggggtctatattagacattcttaatgaaaggaaatccaaattaagaattgcatatcctgccaaactaagcttcataaattaggggaaataaaattccattcagaaaagcaaataataaggatatttgtgaccactagacatagtttacaagaggtccattaggaagtgctaaccacagaaacaatagacaattactggccaccacaaaaacacatgtaagtacatagaccaataagactgtaaagcatctatacaatcaagtttacatgagaatgagctaacatgaagacaggatcaaatttcacatttcaacactaactttgaatgtaaatgggttaaatgttccaactcaaaggcagagagtagcagactggataaagcaagacccaagtgcatgctataatcaaggaactcgtctaacatgcaatgacacacatagactcaaagtaaagtgaatgaggaagatctatcaatacaaaaagcagaaattgctattcttatttcaaacaaaacagaccttaaagcaagaaggatcaaaaaagacaaaaaagggcattacataaaggtaaagggttccattcaacaagacctaactatcctaaatatatatgctcccaacattggagcactcagatgcacaaaacaagttcttggagacctatgaagagacatgggtaaacacaacaatagtgggagactccattaacagtattagacagattgttgagctagaaagctaacaaagatattcaggaaataaactcaacacttgtccaaatgaacctaacagacttcagcagaacactggactaacagcagaatatacattattttcacctaggcatggtacatagtctaaaattaaccacacactcagccataaagcaattctcaacaaattcaaaaacccaaaatcataccaactacactctcagaccacagcatattaaacatagaaatcaataccaagatctctcaaaaaccatacaattacattgaaattaaacaatatgcccctgaatgacttttgggtaaacatgaaattaaggcagaaatcaaagaattctttgaaactaatgaaaccaatgataaaacatatgagaatctctgggacacagctaaagcagtgatgagagaaaaatttacagcactaaacacccccatccaaaagttagaaaaatctcaacaaagtaacatcacaaatagaggaactaagaaaataagaccaaatcaaccccaaagctagcaggaaaaaaaaaaaaataacaaaaattacagctaaactgaacaaaatttagacgtgaaagccatacacacaatcaacaaaatgaaaagttgtttttttgaaataataagtgagattgatagaccactagttagactgataaagaaaaaagaagatccaaataaacactatcagaaatgacaaaggagacattaccaccaatgctacagaaatacaaaagaaaaaaaaaaagtctattaagaccatctctata

SEQ ID NO: 4946 - DNA, 357 bp, Homo sapiens
  source 1..357: mol_type = other DNA
ttgatttaatatttattaagcactcatctaataattttgcattctctttaacttgcttaatagggaaattggggtgttttctgctcaacagacatatctgacctgtatgataatggaatttctcattataagtcaataaacttttgttctttctgtatctttcagtcttatgatgtaatcagcgcgatttcacttcctgaatttcgatgaattctaagacatgggcaagatcgggttgtaagacctctgagatttaaggccatgccctggatcatggtgaacttaccaaagcaaacaatgcctgtgagatggtcctgcagcagccaaccagtgaactcttttggtgacatcctgttc

SEQ ID NO: 4947 - DNA, 1125 bp, Homo sapiens
  source 1..1125: mol_type = other DNA
ttggtgctgaaatctgggaggggctcaggtctgcatcccccatggacctagccctccaccccaaagagcaggccacagcagctggacaaaggaaggtcctcagcctccagtcgcctctctgtgcatgcagtcggtcactgatctcgcctactggtaagtttccccagaagcccagttaacagagaaaaatctgcacagcctctcttggtttctccagtccaaagccccaacattggtccaagaaggctctggcatgtgccaggcacccgataattatctagtcttaaggggacgcctctaagccatttaatcctgttccaggaacaaaaaaggcagcagtgatgatggctccttttatcttctccctccggctgtccaggatggcctccttttccctgttctcccaagcccaccctcccttatgggaaactcccggtcctctgttccaaaaaaaaaaacagtcctctaggctgcctcataaaaaaacctgcaaacattaggcctcaagctagatatgtgccctaagcgccttgtctttttttttttttttttttttttttgcaattcagtctggccacaatatgaattaaataatgggtccaaatggcccgcaaatggaacattcaactttgcaattctaacttatttaagcaattaatgctgacgactggagaaatggcaagaaattccttacgtccaggcctttttacactcagatcacaacctgtcctctgcaattcttgcttatctgttcaaatccttcccctccattctagccgccctaatcacctttctcctcccaaccgtacctctttttttctcattaaatccagcagactgctgtccacccctcccagcccctacctcttcctctcaaccatcttctttaaccccccaagcctcctcattgtcttctcagctgccatcttcccagtcagctgtatccacttatttttctacaccgtcccctcctcagaacaattctaatattacctatacctattctcctccccaacgccctctcctgaggcttgtaaacctatcctgccaccttacgcctctgtctatcctccactgcctattaactcaaccgcgctttccccttcaaaccctcagaaggaatca

SEQ ID NO: 4948 - DNA, 5810 bp, Homo sapiens
  source 1..5810: mol_type = other DNA
ggggaaaagccaagatggccaaataggaacagctccagtctacagatcccagcatgagcaacgcagaagatgggtgatttctgcatttccaactgaggtaccgggttcatctgactggggagtgccagacagtaggtgcaggacagtgggtgcagtgcaccgtgtgcaagccaaagcagagcgaggcattgcctcacccaggaagcacaacgggtcagggaattccctttcctagtcaaagaaaggggtgacagacagcacctggaaaattgggtcactctcaccctaataacatgcttttccaatgggcttcaaaaatggcacaccaggagattataccccgcacatggcttggagggtcttatgcccacagacctcactcattgctagcatagcagtctgacatcaaacttcaacgtggcagcaaggctgggggaggggcacccgccattgctgagttagttgtttgattaggcaaaaaaagctgcctggaagctcgaactgggtggagcccatcacagctcaaggaggcctgccggcttctgtaggctccccctctaggggcagggcacagacaaagaaaaagacagcagtaaccactgcagacttaaatgtccctctctgacagctttgaagagagtagtggttctcccagcatgcaccttgagatctgagaacaggcagactgccttctcaagtgggtccctgaccccccagtagcctaactgggaggcactccccagcaggggcagactgacacctcacaaggccaggtactcctctgagacaaaacttccagaggaacaatcaggcagcagcatttgcggttcaccaatatccgctgttctgcagccacaactgctgatacccaggcaaagagagtctggagtggacctctagcaaactccaacagacctgcagctgagggtcctgtctgttagaaggaaaactaacaaacagaaaggacattcgcaccaaaaacccatctgtacatcaccatcatcaaagaccaaaggtatataaaaccacaaagaagtggaaaacacagagcagaaaaactggaaactctaaaaatcagagcacctctcctccaaggaacgcagctcctcaccagcaacggaacaaagctggacagagaatgactttgatgagttgagagaagaaggcttcagatgatcaaactactctgagctacaggaggaaactcgatccaatagcaaagaagttaaaagatgtgaaaaaaattcgaggaatggacaactagaataaccaatgcagagaagtccttaaaggacctgatggagctgaaaaccaaggcacgagaactacatgacaaatgcagaagactcagtgtacgatgcgatcaactggaagaaagggtatcagtgattgaagatcaaatgaatgaaatgaagcgagaagagaagtttagagaaaaaagaataaaatgaaatgaaaaaagcctccaagaaatatgggactatgtaaaaagaccaaatttatgtctcattggtgtacctgaaagtgatggggagaatggaaccaagttggaaaacactctgaaggatgttatccaggagaacttccccaatctagaaaggcaggccaaaattcaaattccagaaatacaacgcacgccacaaagatactcctcgagaagaacacctacaacacacataattgtcagattcaccaaagttgaaatgaaggaaaaaatgttaagggcagccagagagaaaggtcgggttacacacaaagggaagcccatcagactaacagctgatctcttggcagaaacactacaagccagaagagagtggggaccaatattcaacaatcttacagaaaagaaatttcaacccagaatttcatgtccagccaaactaagcttcataagtggaggagaaataaaatcctttacagacaagcaattgctgagagattttatctccacaaggctggccctaaaagagttcctgaaggaagcactaaacatggaaaggagcaaccagtaccagccactgcaaaaacatgccaaattgtaaagaccattaaggctaggaagaaacgcgatcaactaacgagcaaaatgaccagctaacatcataatgacaggatcagattcacacataacaatattaactttaaatgtaaatgggctaaatgctccaattaaaagacaaagactggcaagttggatagagtcaagaaccatcagtgggttgtattcaggaaacccatctcatgtgcagagccacacataggctcaaaataaagggatggaggaagatctacaaagcaaatggaaaacaaaaaaaggcaggggttgcaatcctagtttctgataaaacagactttaaaccaacaaagatcaaaagagacaaggccattacataatggtaaagggatcaattcaacaagaagagctaactaccctaaatatatatgcacccaatacaggagcacccagattcataaagcaagtcctgagtgacctacaaagagacttagactcccacacaataataatgggagactttaacaccccattgtcaacattagacagatcaacgatacagaaagttaagaaggatacccaggaattgaactcagctctgcaccaagcagacctaatagacatctacagaactctccaccccaaatcaacagaatatacattcttttcatcaccacaccacacctactccaaaattgcacacatagttggaagtaaagcactcctcagttaatgtaaaagaacagaaattataacaaactgtctctcagaccacattgctaccaaactagaactcaggattaaggaactcattcaaaactgctcaactaaatggaaactgaacaacgtgctcctgaatgacttccaggtacataatgaaatgaaggcagaaataaagatgttctttgaaaccaaggagaacaaagacacaacataccagaatctctgggacacattcaaagcagtgtgtagagggaaatttatagcaataaatgcccacaagagaaaggaggaaagatctaaaattgacaccctaacatcacaattaaaataactagaaaagcaagagcaaacacattcaaaagctagcagaaggcaagaaataactaagatcagagcagaactgaaggaaatagagacacaaaaaatccttcaaaaaatcaatgaatccaggagctagttttctgaaaagatcaacaaaattgacagaccactagcaagattaataaagaagaaaagagagaagactcaaatagacgcattaaaaattgataaagggcatatcaccacagaaatacaatctaccatcagagaatactataaacacctctatgcaaataaattagaaaatctagaagaaatgcataaattcctggacacatacatccacccaagactaaaccaggaagaagttgagtctctgaatagaccaataacaggctctgaaattgaggcaataatcaacagcttaccaaccaaaaaaagtccaggaccagatggattcacagccgaattctaccagaggtacaaagaggagctggtaccattccttctgagactattctgattgatagaaacagagggaatcctccttaactcattttctgaggacagcatcatcctgataccaaagcctggcagagacacaaccaaaaaagagaattttagaccaatatccttgatgaacatcaatgcaaaaatcctcaataaaataaaggcaaaccaaatccagcagcacttcaaaatgcttatccaccataatcaagtgggcttcatccctgggatgcaaggctgattcaacatatgtaaatcaataaatgtaatccagcctataaagagaaccaaagacaaaaaccacatgattgtctcaatagatgcagaaaaggcctttgacaaaattcaacaacccctcatgataaaatctctcaataaattaagtatcaatgggacgtatctcaaaataataagagctatctatgaaaaacccaaaaccaatatcatactgaatggacaaaaactggaagcattccctttgaaaacgggcacaagacagggatgccctctctcacgactcctattcaacatagtgttggaagttctggccagggcaatcaggcaggagaaggaaataaaaggtattcaattaggaaaagaggaagtcaaattgtccctgtttgcaggtgacatgattgtatatctagaaaaccccatcatctcagcccaaaatcttctcaagctggtaaccaacttcagcaaagtctcagcatacaaaatcaatgtacaaaaatcacaagcattcttatacaccaataacagacaaacagagagccaaatcatgagtgaacacccattcacaattgcttcaaaaaaataaaatacctaggaatccaacttacaagggatgtgaaggacctcttcaaggagaactacaaaccactgcacaatgaaataaaagaggatacaaacaaatggaaggacattccatgttcatgggtaggaagaatcaatatcgtgaaaaaggccatactgcccaaggtaatttatagatttaatactatccccatctagctaccaatgactttcttcacagaattgcaaaaaactactttcaagttcatatggcaccaaaaaaagcccgcatcaccaagtcaatcctaagccaaaagaacaaagctggagacatcacgctacctgacttcaaactatactacaaggctatagtaaccaaaacagcatggtactggtaccaaaacagagatatagaccaatggaacagaacggagccctcagaaataatgctgcatatctacaactatctgatctttgacaaacctgagaaaaacaagcaatggggaaaggattccctatttaataaatggtgctgggaaaactggctagacatatgtagaaagctgaaactggatcacttccttataccttatacaaaaattaaggcacgatgagttaaagacttaaatgttagacctaaaaccatgaaaaccctagaacaaacctaggcaataccattcaggacataagcatgtgcaagtgcttcatgtctgaaacaccaaaagcaatggcaacaaaagccaaaattgacaaatgggatctaattaaactcaagagcttctgcacaacaaaagaaactaccatcagagtgaacaggcaacctacaaaatgggagaaaatttttgcaacctactcatctgacaaagggctaatatccagaatctacaatgaactcaaacaaatttataagaaaaaaacaaacaaccccatcaaaaagtggacaaagtatatgaacaggcacttctgaaaagaagacatttatgcagccgaaaaagacatgaagaaatgctcatcatcactggccatcagagaaatgcaaatcaaaaccacaatgagatataatctcacaccagttcgaatggtgatcattaaaaagtcaggaaacaacaggtgctagagaggatgtggagaaataggaagacttttacactgttggtgggactgtaaactagttcaaccattgtggaagtcagtgtggcgattcctcagggatctagaattagaaataccatttgacccagccatcccattactgggtatatacccaaaggattttaaatcatgctggtataaagacacgtgcaaacgtatgtttattgcggcactattcacaatagcaaagacttggaaccaacctaaatgtccaacaacgaaaaactggattaagaaaatgtggcacatatacaccatggaatactatgcagccataaaaaatgatgagttc

SEQ ID NO: 4949 - DNA, 314 bp, Homo sapiens
  source 1..314: mol_type = other DNA
gctgggcgcattggctcccgcctgtaatcccagcactttgggaggccaaggcgggcagaacacttgaagccaagagttcgagaccagcctggctaacatggtgaaactccgtccctactaaaaaaaatacaaaaatcagctgggcgtggtggcacgtgcctgtatttctggctacttgggaggttgaggcaggagaatcgcttgaacctgtgaggtggaggttatagtgagccgtgatcatgccactgcactccagcttgggcgacagagcgagactctgtctcaaaaaaataaaaaaaataaaaaaaataaaa

SEQ ID NO: 4950 - DNA, 364 bp, Homo sapiens
  source 1..364: mol_type = other DNA
gatgatgtcagaagtgggatccaaagtagagcttataatgacacctaggagtgctgagtgaccaagcaaggtacccaccaggccgattatgtccattgttctcttggagcagctggtcatcatggtaagttctctctcagattcagaagctccgcatatttgtgttttgagctctccaagtttctatgagcccatttctaatccaaactgcgtttggaagtcatgccaaaaactgaactgggtccagaatcaaattagatctggtaattaagtggcttggatccagttagaggcctcttacatctgactgggtcagaagaaaaccagtagtaaatggcaataatgcaaggataaaatttggctt

SEQ ID NO: 4951 - DNA, 1183 bp, Homo sapiens
  source 1..1183: mol_type = other DNA
ccaattcctggcttccccgctgccaactctgctctctatgtctccagtttaaaggtgccccctggaaaaaatgtaacaattccctcacctgtgactggtacctgacagccaccacaccggggcagcaatggctaacggttgacaaagacaatttctttctctctccaaaaccaaacagccttcatcaactccctagccaagactccctatcaggcccttacaggtgccgctctggctggcagttacccaatttgggaaaacgaaaataccctatcatggctacctaccttcacctacaacttctgcctgtccacccccagtctcttctttttgtgtgatacaaactgatatctttgcctaccagccaactggtcaggaacttgcaccctggtctttcaggctccaaccatcaacatcctaccccctaaccaaactattctaatttctgtagaagcctctatctcctcttcacccataagaaataaatgggctctacatctcatcaccctgctaacaggattaggcatcactgctgcacttggcactggaatagcaggcataaccacctcaatcacctcataccaaacactattcacaaccctttctaacaccgtagaagatatgcacacttccattaccagtctccaacgacaattagacttcctcgtgggagtcatccttcaaaactggagagtcctggacctcctaaccactgagaaagggggtacctgcatatacctccaggaagaatgctgtttctgtgttaatgaatctggcattgttcatatcgcagttcgtaggcttcatgacagggctgcagagctttgacatcaagtcgctgactcctggtggcaaggatcatcccttctaagatggataccctgggttgcccccttcctaggacccctgatcttcctcttcctgttactaatgattgggccatgcatatttaaccttgtatcccgcttcatttcccaaaggctgaattgttttatccaggcaagcatgcaaaaacacattgataatatatttcacctttgccacgtctaataccagagcctacgaggaaaccattcggaagctccagaacccaggccctaatcacaacgcccctatccagcaggaagcagccagatgatcaacgacgccctttttcctttttatactaaagtaagaaataaga

SEQ ID NO: 4952 - DNA, 5546 bp, Homo sapiens
  source 1..5546: mol_type = other DNA
taaaactaaatgccttattttcctttgtaatgtggcctggccccagtataagctggacaatgatggctgctggcccagatgggacttttgacttccaaattcaacatgatttagaaaatgtcctccagcacaatggcaagtggtccaagatgctctatatccaggcttttgccaattccctctatcagtcctgttcaccttaccagctgctcctcttaaacaagaaatctgccaaaatgcctccccttccagacaagccctcctcctcctcctcctctgatttttatccagacgacgaatccccacccgccccccagccccactcccaccaccgtctcctcctccttccccttcggctcccccacccccttgttcctatcccccatctcctctaccctctccccaccataactgatctcatactcagcccccttctgctgctgaaaaccaggcacaggcccagaggccctctaaagtccccccattgggggatgttatggagactgaaggcatagtctgagttcatgttcctttctctgtagctgatggctctcagattgaaaagagacttgactccttttccacagaccccacatccttccacaaggaatttctgtatatcactcaatcttatgaccttacctggcatgacatttctgtcatcctctcctcctccctcaccctggagaacagggaacatatctggatcaggcccaagcagacaccctccacggacaagatgctgcccataacccagtcacaaccctcgctattcccagtactgtccccagttgggattatcaggtggcttctgcagacagacagaaactaggccatatgataacatgcctcctaactggcatgaataaaaccgcccttacgactgtcaagtatgaaaagataaagaaatcactcaaggcccctgacaaaaaccctactctttttttctcctgcctttcagagaccgtgattaaatataccagcttaagccctgacactgccgaggacagagtctacctccatttacacgtcatttcccagtcagcccccgacatccaaaagaaactccaaagactggaggatggccctcaaacctcctaaagagacttaatcaaagcagccttcaaggtctttaacaatagagaggaagaaataaaaacccgaaagcttaaaagagaccaggctaaataccagatgctgtcagctgccatacaacaggattccccaatgcatacaaaaatcctcaacctcatgacagtccccatcaggagtctgttttaagtgtagccaacagggtccctgggcaagagtctgccccaatcttgtgccgccctcaaaaccttgcctcatctgtggtatcaagggacactggaagtcagattgcactcaacaagactcttcaccccgcttgaccacctctaactcaaacaggtcctgcaaccctggttccagtctggcaagcattgtagacctggctgctgaagactgacggggcccagggtccgctgcccccaccgccatcaccacctcggaacccagggtaacgctgtcagtctttggtaagcccatgctcttccttttagatctggggactagttactcagttttatcagaatattcttgaccctcctcagttcttctatctctattgtgagagtcaatggaatcccctctaggcacatactggtcccctattatgcaacctattcaatacccccttcatccactccttcttagttatcccttagtgtcctacccctatcttggggtggaatatactgagtaaattccaggcccccatatgactagcctcctgcaattctaccccttttattttactctgctgtccagatgcttccctctcctccccctcatctttgctatccactctgttaccttctgtcaatccagaagtgtggaacgtttctaaacccacaatagccacacatcacatcccagtcaaaataaccttccaagactcctccattttccttcatcagcctcaatattcccttagcccagccagcctcaggggcctcaaacctattatctgtgagtttttacaagctcagattctcaaacctgttaactctccccacaacacccttgtcctggctgtcaaaaaaacagacagattttaccacttggtccaggatctccatgtcatttaccaagtggaggtaccaacctatccagtggcccccaacccctatactctactctcccatattcccccatctagcacacacttctctgtattggatctaagggactttttttttttttttttttttttttttttttttttttactattcccttggatctggcttcccaaagtctttttgctttcacctggtcagacccagatactcacacatctacctaactaacagactgtactcccacaggggttccgggatagccccctcctatttgggcaggctctcaccaaggaactaatcgagcttccccttgctcctagcagcctccttcaatacatcaatgacctccttatgtgtagtccctcctttgatctatccatcaacacatcacccaacttctaaatttcctctatggccagggatatcaggttttacctacaaaggctcaagtagcccaaacccaagtcactaaccttggactcaccctaacccctaattcttgagccatgccagcccgatggaaggagctaatacaggatgtgccccttccccacaccaagaaggacccttcctttttgggccttgttgggtacttccagctgtggatcattaactttggcctgttgaccaaaccactctgcacggcatcacgtgggtccatcctagaacatttggacccagcttgcccattaactcccacttctaaaaactgaaagatgcccttttaatgtcccagcactaggactacccaattccattaaaccctttaccctgtatgttcattgtaatcaaggccttgcccttggatttctctgccaaacccgtggcaacactccagaagccattgcatacttctgaaaactggactctatcatccaaggctggcctccatgcttgaaagttctggatgcagctacattgctggcctcagaggcacaaaaactcaccctctaccagcacattactattgcatcttcccataacttatgggaccccatgagccattgatctcttcttttcctcctgccatccagcttacagcaaccctctaacaccttccagagatgtaaaattctaaatccaaccaccctcctccctataagtacttccaattctgaatcccccactcttgcctagacctcttagcctccctctcctcccctttccaacacatttcagaagcccctttgcggaaggaacccacatggttcattgatggaagctcttttaaggaaccatatctggcagctggctatgccatcattgccgaaaacaaactcctataatccaatgctctctcatcacatatcacctcacaacaagcggaactatttgccctaaccaagaccctcactctagcaaagggaaagagggtcaacatttacaccaattccaaatatgcataccatgtcctacagtctcacactgtaatctggcaggaaaggggtttttctaactacaaaaagaaccgccataataaatggcaaactcatacacaagccgctggaggcagctaaactaccactagaggccgtcattatccattgcaagggacaccaaaaggctacagatgccataaccaagggaaacttcttagcagattcggcagcctggcaggcagcccttagaacactattgttattgcccattttccctagcatacacccaagaagaaaaaggtgccttgctggctccagggctgttcataacgaaagctgaatttacttagactacaaactcatcctacccaagacccaaaaactttctgttctcacccacatccataaccaattccatgcgggttatctcccgttgctccaatttctaaaaacctgtatacattcccttaccatggccatcagcttggaccgcctcactaaaggttgctctgcctgcagtcagacttcccctcaggggcccttagaccacctccttttccctcccttcaggcccaaaggccagttgccgggacaggattggcaaattgacttcactcatacgttcccccataaagaaagtctgatatctcctcacgatggtagataccttttcaggtggatagaagcctttcttactaccactgaaaaggcacacaccattgcctctaccttcctcacacacatcatcctttgattcagcctcccctcatctatacaactggacaattgaccagcatttatctcccaagtcactcaacaggtttctaagtctttaaacatcatatgggtttttcacattctctatcacccccaatcctcgggtaaatttgaacaggcgaatgccctcttaaaacaacagttaaccaaactttccctagagatcaaaatgaaaactgaatatcacttcttcccttggcccttatgtgcctcagggccctcccccgaaaacctctaaatctaagtccttttgaacttttgtatggacgttctttcgtcctacagaactttgctccatcccctcccttacaggacacctggccagcactgcacctcactcaacacttagtccgacagtacactgacactcacctccccaaacctgaggattcttcccaattcactttcttacccttacagccaggagactgggtctgggtagcacacccctcctcccctttccaacaaaatggaagggtccctatcaggttatattcaccatccccgctgctgcaaagttaacatcctttccctattgtatacaccattccaaatttaaaaaggcacccggcccacaccccgaagtctcctcaccccggaaatattcttcctttcccacaggaccaacctcgctgtgcctaacaagaattccagaagtcacccatccgaaaggcactggcccatgacactctccacttccaatcttaaatcttttacttcataccttgtctcagatctctcctggtaccccttccccacgcccttagataatccatctcaattcctcatgctaattgaggagctatggctgcaaggcaccttccaggatttcacacctacacaaatctcctttttctccttttgccttctctgcttatgggatattctgagtccccacccccaatcactgacagctgggcccccttcatcagcctcacacaccacgtattaagtcagtcacaatctcccctctcctctaactgctggatttgtctttctacacacacccaatgattcacggctcttccggctgacctacttacatggacacagtccaacgtgagcttacacatttcttacttggctataccattcttggctgattcattcctgaaaccggttcataacctggaaactcagctaaacacctttccttcaaactcagctctctcagcatggtttcaggtagggctgttgccctccttcacctaatagcttctggacta

SEQ ID NO: 4953 - DNA, 120 bp, Homo sapiens
  source 1..120: mol_type = other DNA
ctcgaccctgatttcctcttctccaggtttgagacggtaacatctgttttgcaggattgtgaaaaatgaggtcctctttctagagtacctgacaggttgcttggcatccagaagatgttt

SEQ ID NO: 4954 - DNA, 84 bp, Homo sapiens
  source 1..84: mol_type = other DNA
gcttgaacccgggaggcagagattgcagtgagccgagatcatgccactacactccagcctgggcgacagagtaagactccgtct

SEQ ID NO: 4955 - DNA, 94 bp, Homo sapiens
  source 1..94: mol_type = other DNA
ggttgggcacggtggctcacccctgtaatcccagcattttgggaggccgaggtgggtagatcacgaggtcaggagttcaagatcaacctggaca

SEQ ID NO: 4956 - DNA, 80 bp, Homo sapiens
  source 1..80: mol_type = other DNA
ttttttcccatgtctctggggccaaaaaccttataccaagtacctattggcacccgaatatatttgtagaatgaatgaat

SEQ ID NO: 4957 - DNA, 62 bp, Homo sapiens
  source 1..62: mol_type = other DNA
atcctcaggacccagaatggtatattccacataaaagatgctttgtttatcaaatgaatcaa

SEQ ID NO: 4958 - DNA, 69 bp, Homo sapiens
  source 1..69: mol_type = other DNA
tgtcttgggtagcagaagaaaatatgtgtaaaatcaatttataatttgtaaactgccacccatatataa

SEQ ID NO: 4959 - DNA, 50 bp, Homo sapiens
  source 1..50: mol_type = other DNA
tttatctttgcatccccaatgcctagcaatgagattggcacacaatagat

SEQ ID NO: 4960 - DNA, 57 bp, Homo sapiens
  source 1..57: mol_type = other DNA
aaataaggcaatacctatgttagcattttgtgaactctaaggcaccatataaatgta

SEQ ID NO: 4961 - DNA, 43 bp, Homo sapiens
  source 1..43: mol_type = other DNA
ttttcagtgcctttaacagtgagttcacatagtaggcaatcaa

SEQ ID NO: 4962 - DNA, 52 bp, Homo sapiens
  source 1..52: mol_type = other DNA
tgcatattaaagtgctttgtaaactaaagcatgatacaaatgtcaatgggct

SEQ ID NO: 4963 - DNA, 41 bp, Homo sapiens
  source 1..41: mol_type = other DNA
tagctctagcacccagcatggtatctggcacattataggtg

SEQ ID NO: 4964 - DNA, 41 bp, Homo sapiens
  source 1..41: mol_type = other DNA
tgaaaaaaaatagtgaatgtgctttgtaaactgtaaagcac

SEQ ID NO: 4965 - DNA, 45 bp, Homo sapiens
  source 1..45: mol_type = other DNA
tcattgcatttttagtgcctagcacagggacaggcacagaaaagg

SEQ ID NO: 4966 - DNA, 171 bp, Homo sapiens
  source 1..171: mol_type = other DNA
agggggtggtaagctatgaacagcaggccaaatccaattggctcaaaaactaagaatgattttgaccttataaaaacgttgtttaaaaaacaaatatgtaacagaaaccatatggcccacagtctaaagtatttatgatttgaccccttacagaaaaactgtggacccctg

SEQ ID NO: 4967 - DNA, 1285 bp, Homo sapiens
  source 1..1285: mol_type = other DNA
gccaggtttctcactgtagaaatgggaggtaacagataagcaaggaggtgagactataatgatccatgtggcaatgattagagttggagacgtaggtataaacacatttagtttaatatagatacagatggttatatatatttatagctatgtgcatatacacacgttagaatgcaaatatatatctccttgctcttgtcaactgaaaaggtcttgaaggaatgacactccagtagtaatgagcgcacctagcattcacttcttgatttctaatattactctccaataaaaagtatcaaggctccttgcagaaatacatcattttaggtccaggcaggagatatgcaaatgagtctgaagcatgttgtagttccaaaaataagaaagtgctcaaacaaaaaacccacattcatggggttatatcaaagccaaatgaaagacctcccaatggccaaagctggaacaatttgaacaacagaataaagtaatactgtattataacccagagtataaaatatccctgagatcatactgatataaatgactgaataaacacaatacattgtggagaaaagacatcctgtgcaaaagaattccaaataatttatgtaaatactctgccctcaatgaggtggaaggtaatttcccattccttaagtgctggctgcacatagtgacttcctatgtgaacagtatagtagggaaatggagaaataaagactaattttacgctggagaaacctgacaaatagtacctcagacaggtgattaaggataacataaacagtgataagtcatgttgatagtatgtactcttgataagtgataagaatggcactctacctttgtggtcttcctcctaaacactcataaacccaatctagtcatgagaagaacatcagacaaattccaatagagagacattctatagaatactggaccattagtcctcaaaactgtgaagttcatcaaaaacaaagagtctgagaaactgtcattaccaagaggagcctaaggagacatgactactaaggacacatgcagcgtggtatcttcaatgggatcctggaacacaaaaagaacattaaggaaaaactaaggaaatctgaataaaatatggactctagttaataataatgtatcaatattggtttgttgtgacaaatgtaccaaactaatgtaaaatgttaacactgggaaaaactgggtgtgaagtacacagaaactctatcttcagaatcattctgtaaatctctacactgttctaacattaaaaggttatttt

SEQ ID NO: 4968 - DNA, 124 bp, Homo sapiens
  source 1..124: mol_type = other DNA
ttagaaaaactacctaaattttataatcctttaatttcttcatctggagcacctgcccctacttatttcaagaagattgcagtaaaacgattaaatgagggaacatatgcagaggtgcttttaa

SEQ ID NO: 4969 - DNA, 114 bp, Homo sapiens
  source 1..114: mol_type = other DNA
ggccgggtgtggtggctcacacctgtaatcccagcactttgggaggctgaggtgggaagatcccttactgccaggagtttgagaccagcctggccaacattaaaaaaaaaaaaa

SEQ ID NO: 4970 - DNA, 312 bp, Homo sapiens
  source 1..312: mol_type = other DNA
ggccgggcgcggtggctcacgcctgtaatcccagcactttgggaggctgaggtgggcggatcacctgaggtcaggagttcaagaccagcctgaccaacatggagaaaccccatctctactaaaaaatacaaaattagctgggtgcggtggcacatgcctgtaatcccagctactcggcaggctgaggcaggagaatagcttgaatccaggaggtggaggttgcagtcagccgagatcgcgccattgcactccaacctgggcaacaagagcaaaaatccgtctcaaaaaataaataaaacataaataaaataa

SEQ ID NO: 4971 - DNA, 657 bp, Homo sapiens
  source 1..657: mol_type = other DNA
gaaaaccagaggccatcttcccctgccaaacaccttgcttgcgtcacagggaaaactgagacagtttccttgccctcagctccagagcagcaatgcagaggttttgcccgaggggaaaggcaggctgcaataacagagttctgaaggtatccccaaaataaatgacttaatttggaacacaatggggagaaaaaaaagcctaaggatgttcccaataacaatagagatttgggtggtaagctattaagagaagattagtaactacttgagagcaacaagctatagaaacaccagctagaagacagccagagacccagagaaaaagacaaataagagcctacctgggatctgagccaacctcaaaggttggtctcaaatactatctctataaaagggcccaaatttggatcacatagttaggcaatttatgcccctggacatggtcaaaaccaatagagtaatcagtctgaaattagtgcaaactaatgattaggtgagataacagaggctgacagattaacagagaaattagaaaaagacactgaaagacagccctgctaaaaccaatcattccatagtgactatgcttattcccaaagctgtcccactaaagagggacaccaaaggatgtacactgtaggttaaaaaacacatcac

SEQ ID NO: 4972 - DNA, 926 bp, Homo sapiens
  source 1..926: mol_type = other DNA
aactataaaggcatacaatgattaaaagtacaagggtggagaaagatacagcataaaacactaaccaaagaaataggttgaaaatatttattaatatgaaacaaaatagacatcagaacaggaaagattatcaaaggataaagagaaacctcatgaaaagacagttatttccccaagaacacataataatcttataggtatacgcacctaatcaaaggttttcaaaatgaataagacaataaatgaggtatgaaaaaacaagtaggcatatctaaaattagtttgagatttgaacactgctaagaaattaataaaacaagtaaaaaatcacaaatgatatggaaggcctgaacattactatcaaacaacttcatataatgatagaacactttaagcaacaacagaatacatattcttctcaattatatgtagcattcacaaagacagatcatgttttggcttattaaataaacctcaattaattatttaaacatagaaaaaaatacaaggtgcatcctgagatcatacaaattagaaatgaaaaaaaaaaatctggaaaattccctcaaacaattggatatgaaacaagaaactttcaaataacacataggtaacaaacaaagtctcatgagaaattaaaacatggattgaactaaagaacaatataaatacaatatatcaaaacatataggatgcagacaaagcagtgttaacagggaagtttatagcattcaatatatacattaaaaaataatatctaaagtcagtaaccaaagtttgtctcaaaggaaccagagaaagaagagcaaagtaaatataaagcaagatgaagaaagggaataataaacattgagagcaggaatccaaaacaaaaaacgaaaaaacagaaacatacaaaagaaagaaatcaataaaaccaaaagctg

SEQ ID NO: 4973 - DNA, 211 bp, Homo sapiens
  source 1..211: mol_type = other DNA
caagaccagtctgaccaacatggagaaaccccgtctctactaaaaatacaaaattagccgggcgtggtagcgcatacctgtaatctcagctactcgggaggctgaggcaggagaaccacttgaactggggaggcagaggttgcagtgagccaaggtcatgccattgcattccagcctgggcaacaagagcgaactccatctcaaaaaaaaa

SEQ ID NO: 4974 - DNA, 266 bp, Homo sapiens
  source 1..266: mol_type = other DNA
ccttattgtgagattgggtacttcccatgctttcctacttggcctgctctggtgatgaattcgtttctgcagactttccctgggagtaatttgtacacatactgactgccccatattttacatccctcattcaaggtactggctcctgtatcacccagctctggagttgaaagagctcttcattcctgagtctcctgtaccactgagaataggtagttttctctcctctcctctcctctcccctcccctcccctcccctccccccc

SEQ ID NO: 4975 - DNA, 1328 bp, Homo sapiens
  source 1..1328: mol_type = other DNA
agaataggtgattttcaaacttggaaacattcagaagttatcgcctcagtttcagattgagtagtctcaaagagattacagacatctaccacaaattctctacttggtgtggtgcaaaatcagtatgatgtaaactttgtctctcagtttcttcaaaggaaagaagcaactggaacacacatataacactaacccttccagctgcattatgagggaccagtacctgtctcaaggcaaaattatgacttagttcatcctcacctctggaggccagtaaaagtgggttatagaagaacaaagaggcatctagatctttcactgggttatttggagagaaacatctcctaccgaaggccagtttaacaagactggtagaggaggttatcttatctaattcacagaaatcaacacattgagtcaagaaaaatgaaacacagaaacactctaaataaaagaagataagtcttcagaaaccaaccctaatgaaatgaagatatgtgattaacctgacaggaaattaaaaagagcaaccataaagagtctcatgggagcaatgcatgaacaaactgagaattttcataaagaaataaaagataacaaaaagtataaagttgaagaatacaataactggactcaaaaatttaatgtgtccaacagaagaatcgatgaagcagaagaaagggctatcaaacttgtagataggccattggaaatcatgtaatgtgaggagaaaaaagaaaaaagattgaagatagtttaagagacttttgagacatcctcaaaggggaataatttatacattaccagatggagaagatagagggaaaaggacagaaaacatatttgaagaaataatgtcagaaaacctcataattctggcaaggaaatagaaatttagatctaagaatctcgaacatcaggtatgatgaatccaaggagactcacaccaaaccatattgtaattaaataaaggttaaagacaatcttcagagcagcaagggaatagtctcttcttacatacaaaatgatccacggaagactgtcagcagacttcaccagaaaactttcacgccagaaggcagtcgtgatatatacaaaaagctgaaaggaaaacactgccatccaggaatactatctccaactatcctgtgtttcaaaaattaaggagaaatataaagttctcaaacaaaagatgtgggagtttaccaccactagacctgcacgggaagaattgctaaagggagtccttcaagctgtagtaaaagagtgctaattagaaacatgaaaacgtgagtataaaactcgctgataaaagtaagtacatagtt

SEQ ID NO: 4976 - DNA, 1164 bp, Homo sapiens
  source 1..1164: mol_type = other DNA
aatacttaacatctttgcatgataaaaacctgaacaagttaggtataaaaggaagatgtctcaacacattaaaggccctatatgaccggcccagagctgaaatcttaacaccgaagagttgaaggctttttctctaagatcaggaacaagacatggatgccattttttctccttctgttcagtgttgtactggaagtcatagcaagagcatttaggcaagagaaataaaagacatctaagtaggaaaagaagaaaaaacttgcctctcctgattatcttatcttatagctagaaaaccttaaagactccattaaaaaaaaaaaaactatagaactaataaaatgaattccataaaaagtgctacgtacaaaattgacaattaagtctgtagcatttctatacactaacaaacaacaatctatccaaaaaagtaatcaggaaactaatcacatttacactatttactaagtaaacaaacttatgaatgaatttaaccaagtaggttaaagatctgtatagtgaaaacattgatgaaacgaattgaagattacaaaaatagaaatttttctttgtacatggattgggaaatttatattgttataattttcatactgccaaaagaaacatacagattctgtgtaatcaatatttcaatgtcctttttatttttattttttttacagaaatacaaaaaaaattctaaaacttgtatggaactacaaaagacattaaataatcaaagtaatcttgagcaacaaggacacagctggaggcatcactctacctgattttgtaatccattatcaaaaaactgtggtaccagcataaaaacagattcactgaccagtggaacaggaaagcccagacataactcatacatttccatccaattgatttttgacaaaagtggcacacagaatggggagaggacaaataaataaataaattgttttgagatatctgtatatctatatgtgaaattgaaccattttctcatagcatatagaaaaatcaactcaaaatggattaaagcctgaaatgttgcctttgaaactgtaaaactactagtagaaaatataggggaaaagctctatgatgttgttctgggcaatgatttcttggatacatccttaaaagcatgggcagcaaaaacagccagacaac

SEQ ID NO: 4977 - DNA, 6112 bp, Homo sapiens
  source 1..6112: mol_type = other DNA
ttcataccctagtggtgcctggaaccccagcaagatagacccattcactcccctggaaagggggctgaagccagggagccaagtggtctcgctcagcaggtcccactcccacagagcccagcaagctaagaaccactggcttgaaattcttgcgccagcacagcagtctgaagtcgacctgagatgattgagcttggtggggggaggggcgtccatcattactgaggctagagtaggtgatttacccctcacagtgctaaggactaggtggaactcaacacagtgtgacaaagtggctgtggccagactgctcctctagattcctcttcactgggcagggcatctctgaaagaaaggcagcagccccagtcagggctgtaaataaaactcccatctccctgagacagagcacttgggagaaagggtggctgtgggcacagcttcagtgaacttaaatgtttctgcctgccagctctgaagagagcagcaaatcctgacaaggagggttctcccagcacagcacttgagttctgctaagggacagactgcctcttcaagtgggtccctgacacccatgcctcctgactgggagacacgtcccaacaggggttgacaaacacctcatacaagagagctctggctggcatcaggccagtgccccactgggatgaagctttcagaggaagaactaggcagcaatctttgctgttctgcagcctctgctggtgataaccaggcaaattgagtatagagtggatctccagcaaactgtagcagacctgaagaaaggggcttgactgttaggaggaaaactaacaaacggaaagcaataacatcaacatcaacaaaaagaacccccacacagaaatcccatccaaaggtcatcaacctcaaagatcaaatgtagataaatccctgaagatgaggaaaagccagcacaaaaatgatgaaaattccaaaaaccagaatgccccttctccttcaaatgatcacaaatcctctccagcaaggtcaaaaaactggacagggaatgagcttgacaaattgacagaagtaggctacagaaggtggataataacaaactcctctgacctaaaggaatatgttctaacccaatgcaaggaagctaagaaccttgacaaaggttacaggaaatgctaactagaataaccagtttagagaaaaacgtaaatgacctgatggagctgaaaaacacagcacgagaactttgtgaagcatatacaagaatcaacagccgaattgataagtgacagaaaggatatcagagattgaacatcaacttactgaaatgaggcatgaagacaagattagagaagaaagattgaaacagaacaaacaaagcctccaagaaatatgggactatgtgaaaaggccaaatctacgattgattggggtccctgaaagtgacaggaagaatggaaccaagttggaaaacagacttcaggatattatccaggagaacttccccaacctagcaagacaggccaagattcaaattcaggaaatacagagaacaccacaaagatactcgtcgagaagagcaactccaagacacataatgttcagattctccaaggttgaaatgaagaaaaaaatgttaagcacagccagagagaaagatcaggttacctacaaagggaagcccgtcagactaacagcagatctcgctgcagaaaccctaaaagccagaagagagtgagggccaatattcaacattcttaaagaaaagaattttcaatccagaatttcatatccagccaaactaagtttcatgagtgagggagaaataaaatcctttacagacaagcaactgctacgggattttgtcagcagcaggcctgccttacaagagcttctgaaggaagcactaaatatggaaagaaaaaaccggtaccagccactgcaaacacaccacattataaagaccaacgacactatgaagaaactgcatcaactaatgtgcaaaataaccagctagcatcataatgacaggatcaaattcacacataacaatattaaccttaaatgtaaacaagctaaatgccccaattaaaagacacagactggcaaggtaaataaagagtcaagacccatcagtgtatccagtatcctgtatccagaagacccatctcacattcaaagacacacataggctcaaaataaggggatggaggaatatttaccaagcaaacggacagcaaagaaaagcaggttttgcaatcctagtctctgataaaacaggctttaagccaacaaagatttaaaaaagacaaagaagagcattaaataatggtaaagggatcaatgcaaagagaagaactaactatcctaaatatatatgcacccaaacaggagcacccagattcataaaacaacttcttagagacctacaaagagatgtagactcccacacaataatagtgggagactttaacaccccactgtcaataatagagagatcaacaagacagaaaattaacaaggatattcaggacctgaactcagctctggaccaagtggatctcatagatatctacagaactctccaccccaaatcaacaatatatattcttctcagcaccacatagcacttgttctaaaatcgacaacataattagaagtgaaacactcctcagcaaatgcaaaggaatggaaatcataacacgcaccctcccagaccacagtgcaatcaattagaactcagaattaagaaactcactcaaaaccacacaactacatggaaactgaacaaccttctccggaatgactactgggtaactaacaaaattaaggcagaaataacaaagctctttgaaaccaatgagaacaaaggacaatgtactagaatctctgaaacacagctaaagcagtatttagaaggaaatttatagcactaaatgcccacatcagaaattgggaaagtgggaaagatctaaaagtgggaaagtgggaaagatctaaaatcagaaagtgggaaagatctaaaatcgacaccgtaacatcacaattaaaagaactagagaagcaagagcaaacaaattcaaaagctatcagaagacaagaaataactaagatcagagcagaaatgaaagacatagagatatgaaaagcctttcaaaaaatcaatgaatccaggagctggttttatgaaaagattaacaaaatagataggctgcttgccagaataataaagaagaaaagagagaataatcaaagagatacaataaaaaatgataaaagggatatcaccactgatcatacagatatataaactaccatcagaggatactataaacacctctatgcaagtaaactagaaaatctagaagaaatggataaatttctggacacgtaatcccttccaagaccaaaccaggaagatgtcaaatctctgaatagaccattaacaagttctgaaatttaggcagtaattattagcctaccaacaaaaaagagcccatgaccagactgattcacagccaaattctaccagaggtacaaagaggagatggtaccattccctctgaaactattccaaacaatagaaaagaaggactcctccttaactcattttatgaggccagcatcatccttataccaaaacctgacagagacacaacaaaaaaagaaaatttcaggccaatatccctgatgaacagcaatgcaaaaatcctcaaaatactggcaaacctaatgcagcagcacatcaaaaagcttatccaccatgatcaagtcagcttcatccctgggatgcaaggatggttcaacatatgcaaatcaataaatgtaatccatcacataaaaagaagcaatgacaaaaaccacatgattatctcaatagatgcagaaaaggccttcgataaattcaacacccctttatgctaaaaactctcaataaactaggtattcatggaatgtatctcaaaataaaaagagctatttatgacaaacccatagccaatatcatactaaatgggcaaaagctggaagcattctctttgaaaactggcacaagacaaggatgctctctctcaccactcctattcaacgtagttttggaagttctggccagagcaatcaggcaacagaaagaaataaaggtattcaaataggaagtgaggaagtcacattgtctctgcttgaagacaacatgattgtatatttagaaaaccctatcatctcagcccaaaaactccttaagctgataaacaacttcagcaaagtctcaggatacaaaatcaatgtgcagaaatcacaggcattcctatacacaaataatagtcaagcagagagccaaatcatgagtgaactcccattcacaattgctacaaagaaaataaaatacctaggaatacaatttgcaagggacatgaaggacatcttaaggagaactacaaaccactgctcaaggaaataagagaggacagaaaaaaatggaaaaactttccatggtcatggataggaagaatcaatatcgtgaaaatggccatactgcccaaagtaatttattgattcaatgctattcccatcaagctaccattgactttcttcacagaattagaaaaagctactttaaatttcatttggaaccaaaagagatcccatatagccaagacaatcccaagcaaaaagaacaaagctggaggcatcacgctacctgacttcaaactatactacaaggctacagtaaccaaaacagcatgatactggtaccaaaacagatatatagaccaatggaacagaacagaggcctcagaaataacaccacacatctacaatgatctgacctttgacaaacctgacaaaaacaagcaatggggaaaaaattccctatttaataagtggtgctgggaaaactggctacccatatgcagaaaactgaaactggaccccttccttacaccttatacaaaaattaactcaagatagattaaagacttaaatgtaaaacctaaaactatcaaaaccctagaagaaaacctaggcaataccattcaggacataggcatgggcaaagacttcatgactaaaacaccaaaagcaatggcaacaaaagccaaaattgacaaatgcaatctaattaaactaaagagcttctgcacagcaaaagaaaatatcatcagagtgaacaggcaacctacagaatgggagaagctttttgcaatctatccagctgacaaaggtctaatatctagaatctacaaggaacttaaacaaatttacaagaaaaaaacaaccccatgaaaaagtgggtgaaggatatgaacagacacttctcaaaagaaggcatatatatggcaaacaaacatatgaaaaaaagctcatcatcactgttcattagagaaatgcaaatcaaaattagaaaatgagataccatttcatgccagctagagtggtgatcattaaaaagtctggaagcaacagatgctggcaaggatgcggagaaataggaacaattttacaatcctggtgggagtataaattagttcaaacattgtggaagactgtgtggcgattcctcaaggatctaataccagaaataccatttgatccaccaatcccattactgggtatatacccaaaggattataaatcattctactataaagacacatgcacacatatgtttattgcagcactgttcacaatagcaaagacttggaaccaacccaaatgcccatcaatgatagactgggtaacaaaaatgtggttcatatacaacacggaatactatgcagccataaaaaagatgagttcatgtcctttgcaggaacataaataaagctagaaaccatcatcctcagcaaagtaacacaggaacagaaaaccaaacaccatgttttcactcataagtgggagttgaacaatgagaacacatggacacagggaggggaacatcatacaccagggcttgtcagcgggtggggggaaaggggagggagagcattaggacaaatacctaatgcaggcagggcttaaaacctaggtgatgggttgataggtgcagcaaatcaccatggcacatgtatacctatgtaacaaacctgcacattcagcacatgtatcccagaacttaaagtaaaataaaaaa

SEQ ID NO: 4978 - DNA, 2177 bp, Homo sapiens
  source 1..2177: mol_type = other DNA
gaaaaaatatagccaaataggaaaggaaagtaaaattgctctgtttgaagatgtcaggtcttatatataaaaacactataagactccaccaaaaactttcagaattaacaacaaatttaatacagatacaggatacaaaatcaacattcaaaaattagaattgcctatacactaacaacaaactatcagaaaaataaataaaacaatcccacttaaaatagcatcaaaatcaacattaaaaggctaggaataaatttaatcaagaaggcaaacaatttgcataatgaaaagcataaaacattcattaatgaaagaaatggaagaagtcacaaataaatggaaacatatcccatgatcgtggatcagaaaaattaatattgttaaaatgtccatactacccaaagcaacctgcagattaaatgcaatctctatcaaaatctgagtgacattttttacagaaatagaaaaaacaatcctaaaatgtatatggaattataaagatcccaaatagctaatgcatattgagaaagaacagcaaaggtggaggcattgcacttactgattttaaactattttgcaaagctatagaaatccaaacaatgtagcacaggcataaaaacagatacctacaccaatgcaacagaactgaaagcccagaaatagactaaccatatcaactaatatctgagttaagtttaagtttccaggaatacacaattagaaaaggacagtctcttcaataaatggtttaaggacagctggatatacacatgcaaaaataaaataaaacgggatccctattttacactcctcacaaaaattaacttggaatgtattaaaggcttaaacataagacttaaaactatgaaactactggaatcaaacatggggggaaccttcatggcattaattttggcaataattttttggatatgacaccaaaagcacaagcaacaagaacacaaataaatgagaatacatcaaactctaaaagattctgcacagcaagggaaacattcaaaaaaatgaaaagactactgacagaatagaagaggatattttcaaaccttatatctaataaggggttaatatgcttataacataagtaactcctacaactcaatggcaaaaaaaaaatcaataatctgatttttaaatggtcatattacctcaatagacattttctaaggaagacatacaaatggccaacaggtatatgaaaaggtgctcaacaaccctattcatcaggaaaatgcaaatcaaaaccataatgagctattgcctcacacctgtcaggatggtttttattaaaaagacaagatataactatttttggcaaaatctgaataaaatggaattcttgtgcatggttgattggaacataaactggcacaaccattaaggaaaacagtacggagcttcctaaaaaaaatgaaaatagaaccaccatattatccagcaatcccacttctgggtatatatttattggacaaaatcagtagctcaaagggatatctgcattcccatgtttattgcagcattattcacaatagccaagacaaggaaacaacctgtgtctgttgacagtaattgttacaattacttatccattcatctgtcaacagacatttagattgtttccatgttttggctatatatacaaaatgggatattaatcagccataaacaagaatgaaatcctgccatttgtgacaacatggatgagtctcgagggcattatgcaaggtgagagatgtcagacagggaaagacaaatgaggtatgatctcacttatatttggaatctaaaataatggaactcagagaaacagtgtagaacggtgattactaggggctgggtgtgagggaaattgggagatgtcggtcaaagggcacacacttttagatataagatgaataaattctggagatcaaatgtacagtatggtgactatacttaacaatattgtactgtacccttgaaatgtgctaagaaagtagtccttaaatgttcataccacacacacaaaaatatgttaactgagtgaggtgacagaatggtaactaacttgggtgcagaaatcatctcacaacatatacatatatctaatcatcaaattgaaaccttaaatttacacaatttcatttgtcaattatatctcaataaagttcaaaaaa

SEQ ID NO: 4979 - DNA, 4753 bp, Homo sapiens
  source 1..4753: mol_type = other DNA
tgcagcccttcttatgaatcttcccaaaaagataccctcctgcttcttcaacatatattctcaaaggggtgtcatatatccccctctaaagcccaaatttcttccccatccattacctatcttggcagagtccttcatcaaagcacacatactctccctgctaactgtgtacagctaatctccaaaaactccaaccccttctacaaagcaacaactcctttccttcctaggcatggttggatactttcgcctttggataccaggttttgccatcctaactaaaccactatataaactcacaaagggaaacctgactgaccccatagacctaagtcctttccccactcttcttttcattccttaaagacaaccctagaaacagtccccacattagcactccctaactcgtcccaatccttcttattacatatagctgaaatacaaggctgtgcgttcagagtttttacacaggatccaggcccatgacctgtagccttcctgtccaaacaacttaacctcacagttctaggctggccctcatgtctacgtgcagcagcagctgccgcttcaatacttctggaggacctcaagctcacaaaccatgccccacttactctctacagctctcataactttcaacatctattttcctactcacacttggtgtatatactttccaccccctaactcctccaactctactcacaattcattgaaactcccacaattaccattgttcctggcacagacttcaccccatcctctcaccttatacccagcaccaaacctgaatctcatgattgtatctccctaatccatgtggcatcctccccatttccccatatttccctctttcctgttcctaatccagaccacacttggtttattgatggtagttcttcaaggcccaatcatcagtcaccagcaagggcaggctatgctgtagtgtcttccacatctgtcattgaagctactgccttgcccccttccactacctctcaacaagccaaactcattgctttaaactgggcccacacccttgcaaagggactatgtgtcaatatctacactgattccaagtatgccttccacatcctacatcaccatgctgttatatgggcagaaagaggttttctcactacacaagggtcctccatcatcaactgcctttataaaaatcctccttaaggctgctttactgcccaaagaagctgaagtcattcactgcaaggggcatcagaggtcaccagatcccattgcttgaggcaacacttatgctgatatgcagcaaaagaagcagctagtattcccacatctgtccctcacagccagttttcttccttctcatctatcactcccacctattctcccactgaaactattacctattaatccattcctactcatgaaactattacctattaatccattcctactcaaggcaaatggttcttggatcaaggaaaattcctccttcctgcctcacaggctcattctatcttatcatcctttcagaacctctttcatgtgggttacaagccaatggcccatctcttagaacctctcatttcttttccatcatggaaatccatcctcaaggaaattacttctcagtgttccatctgctactctaccaccactcagggatatctcacgccccctccctttcctacacatcaagctagaggatttgccccaacccaggactggcagactgactttacccatatgccccaagtcaaaaactaaggtaccttttggtctgggtagatacattcactggatgggtagaggccttttccacagggtctgagaaggccaccacagtcgtttcttcccttctgtcagacataattcctcggtttggccttctgacctctatatagtctgataatggaccggccttcattagtcaggtcacgtaagcagtctcccaggctctcagcatccagtggaaacttcatacccccttaccatccttcatctttgggaaaggtagaaagaactaatggtcttttaaaaacacacctcaccaagctcagcctccaacttaaaaaagactggacagcacttttaccatttgccctccttagaattagagcctatcctcaagaagctacaggatatagtccatttgaactttcatacggatgtactttcttgctgggccccaacctcttgacagacaccagccctctaggcgactatcttctggtactccagcaggctagacaggaaattctccaggctgctaatcttttcttgcctactccagattcccagcaatatgaagacaccctagctggatgatcagttcctgttaagaatatgacccctcaaaccttgatggactggaccctgcttagtcatctatagtaccccaactgctgtctgcctgcaggaccctctgtattgggttcaccattccagaataaagctgtgtctgccagccagccagcctgatctctcctcttcctcctggaaatcgcaagtactctcccctgcttcccttaaactcacttgcatttctgaagaacagtaataacccttatgagcctaatatatcccttcattctattaggtctattcatccttaccctactttttgcaacagggctttacacagtcacccccactacttggactgtgccccaaaaacttgtcatccctactatcttctgtctagtcatactcctattcaccattctcaactactcataaatgccctgcccttgtttacactgccagtttacacttttcctccaaaccatcataactgatatctcctggttttacctcaaaccgccacccttaactctctctgggagtggatagaagctcttcagtggcaaggtacactccaattcctctatcctgataaagtccttttttttttttttttttttacttttctacttactcttatccttgaccccattctccagtcactatctacctctccctagttacctccagcatactatcaatctcacccactctctcctcactgcctccaatccttctctagcaaagaattgttggctatgtgtttccctttcttcctgctcttacaagtccccgctctacaggccgactgggctacctctcctgtctccctgcacctccaaacctcctttacctcatctttaccctcctgaggaacttctttactttctagacagatttggtgagaactccccagacatttcacaccaacaagctgccacacttctccgcatctacttatggtacctttctccttatgtcaagtccacccccccccaaatttggacccctaaccacacaaacaactatccctgttgctgctcctttttgcatctcctgaccacagcctactggaatccctttaggcaaccttccaccgtccaaatgttcctttactctttatctccagaacccagccacacacactaccaaacagatgggagcattccaacttcgcattgctgataagccctctatcattattgacaaactaaaaaacattggcagtcactattgtttaggaagacacctaccctgcatctcactccatccttggctaccctccgcttgctcatctgactctcctcctgactcctcctcttgcttgcttatacccagccccatcaatagcagtgaaaggttactcatagatactatgctctttctcatataccatgagaaccaaacctttcatctacacaattgcaccatcaatccccattacaacctctaacagctgctgtccttgctggatctctaggatttggggtgcaggactcctctttcagtacaccctctcaccttttcactttacatttccagttctgcctgacacaaggtttcttctttttatgtggctcttccacctacatgtgcctacctgccagctagatgggcacatgtactctagtcttccttactcccaaaatccagtttgtagatgggaatgaacaactgcctgtccccctcatgacaccaacatgacaaaaaagagtcatctcactaatccctttgcttgtgggtctaggactttctgcctccactcttgcacttggaactggaatagcaggcatctcaacctctgtcacagcattccgcagcctctctaatgacttctctgctagcattacagatatatcacaagctttatctgtcctccaagcccaggttgactctttagctgcagttgtcctgcagaaccgccaaggcctcaatttactcactgctgaaaaaggaggactctgtatatttcttaatgaagagtgttgtttttacttaaatcaatctggcctggcatatggtaacatcaaaaaactcaaagacagagctcaaaaactcactaatcaggcaactaattatgctggacccacctggtcactctctaactgggtatcctggcttgttccaatcattagtcctgtaatacctatcttcctccatctcttattcgggccttttgtcttccgattaatctctcaattcctacaaaactgcatccaggctatcactaatcactctatatgacaagtgctgcttttaacaagcccacaatatcaccccttaccccaaaatcttacttcagtctaatctctcccactttaggttcccatgccacccctaatcccacttgaagcagccctgagaaacatcgcccatcacccctccataccgcccccaaaattttcacctcaagttttcattaatctttcttgttttatttcttcattattaacataaaaagacggga

SEQ ID NO: 4980 - DNA, 1483 bp, Homo sapiens
  source 1..1483: mol_type = other DNA
tttggtgctgaagacccgggacaggggaactccttcaggagactggtcccctgtcctcatgctacctctgtgaggagatccacctacgacctcaggtcatcagaccagccagcccaaggaccatttcaccaatttcaaatcggtaagcagttatttgcactcgggtaagcagtgtttttgctctctacctaacctctattgcctcccttcaatctctctcctttcaatttcagtttctctcccttcctggtagagacaaaaaggagacacactttatctgtgcattcaaaaactccgatgttggtcacggacttgggaagacagtcttcccttggtgtctgatcaccgtggggacacctgtcttgatcattcacccacattctcttggtggcaggtcaattatggggatgcctgctttggctgctcacccacattacagcccaggactcagtcagggatgcctacgggaagcctgtagttgccacctccatttctccgtgtctctaccttcctctttaaacttaccttctccactatgggcaacattctgccatccattcctccctcttcccccttagcctgtgttcttaaaaacctaaaaccccttcgactaacacctgacctaaaacctaaacatcttattttcttctgtaatactgcttggccccagtacaaactcgacaatagttccaagtggctagagaatggcacttttgatttgtctatcctacaagacctagataatttttgttgaaaaatgggcaaatggtccgaggtgccttatgtccaggcatttttttacaattcattccctccctagtctctgctcccaatgccacttgtcccagattttccttctttctctcccatccactcctcttgtctccaccccaaactcagagtcctctgaatcctccttttccactgacccctcttacctctcttctcccccggctgctccttgccaggctgaatcaggtcccaattcttccatagcctccgcttccccaccctataacccttctattaccttccctcctcacacctggtctggcttacagtttcgttccgtgactaggtctcccccacctgcccaacaatttcctcttagagaggtggctggagctgaaggcatagtcagggtacatgtgcctttttctctatcagacctttcccaaatcagtcagcattttggctctttctcatcagaccccaataaatatatacaggaattccaatatctaactcagtccttcactttaacctggagtgacttaaatgtcatcctgacctctaccctctccccagataaatgagaaagagtttattctctagcccagtcctatgcagacacctgccggcttcataagccaggcctccaagagggcactagggcagttccccgagaggatccccattggcaataccacacagactccccaggtatagctaggtgagattacatggtctcctgcctagtcta

SEQ ID NO: 4981 - DNA, 2178 bp, Homo sapiens
  source 1..2178: mol_type = other DNA
tacccactcccaccacttctattcaacatagtactggaagtactatcaagagagagcaattagacaagaaaaagaaattaaagatatctaaattggaaaggaagaagtaaaatgatctctctttgcacatcatatgatcctatgtgtagaaaactccaaagactccaccaaaaaaacctattagatctaataaatgaattcagtaaagttgcaggatataaaattaatatacaaaaatccatggccattttattcacaaataacaacctagctgagaaatcaagaaaacaatcccatttatgataacataaaacacttaagaatacatttgaccaagaagatgaaagtgcatcagtatagcctgcacactgaaaaccacaaaacattgatgaaatacattgaagaggacacaaataaataaaacgatattccatgctcatagattggaagaattaatgttgttaaagtgtccatactacccaaagcaatatatagattcaatgcaatccctatcaaaatctcatcagcattcttcacagaaatagaaaaaaatcatacaatttctgtggatccacaaaagatcccaaataaccaaagcaattctgagaaaaaaaaatcctggaggcatcatacttcccaatttaaatttatattacaaaacgagagtaatcaaaacaatacagtattggcataagagatacacaggacagtgaaatagccagaaataaatccaaacatgtatggttaatgaatttttgacaagagcaccaaaaagacaaaatgagaaaagggtagtctcttcaataaataggtgctggaatttccacatgcaaaagaatgaaattagactcttacattacaccatacacaaaaatcaatccaaaatggataaaagatctgaatgtaagacctgaagccataaatctagaagaaaacataagggaaaagctccttgacactggctttggcaatgtttccttggatatcacaccaaaacctcaggctacaaaagcaacaataaataaatgaaattatatcaatctaaaaaacttctacacagaacgaaaacaatcaacaaaatgaaaaggcaatgtacagataaggagaaaatatttgcaaaccatatatcaggcaaggttttaatattcaggatttaggaagaactcatacaactcaatagcaagacaacatataacctgattaaaaaaaagtggggaaaggacttgaatagacatttcttcaaagatgacagaaaatgaccaacaggtatatgaaatggtgctcaatatcaccagtcatcaggaaaatgcaaatcaaaactactttgagataccacctcatacatgttaggatagctattatcaaaaagacaagagctaacaagtgttggtgagggtgtggagaagagggagcacttgtacactgttagtgggaatgtattatatattggtgcagccattatggaagacagtatggaggttcctaagtaaattaaaaatagaactaccatatgacccagcaatccctcttctgggtatatccccaaagggaatgagattatctctgcactcccaagtttattgcagcacaattcacaatagtcaagatacagacacaacctaggtgttcatcaatgggcaaatggataaagaaactgtgatatagagagatcaatagatagataattagaatattatttagcctttaaaaagaaggcagtcctgtcatttgccaaaacatggatagacctagaagacattatgctaaatgaaataagccagacacagaaagaaaaatattgcgtgatctcacttatatgtggaatcaagaaaaaaaaggttaaatatatagagatagagaataaaacagtaattactaaggtcaggataaggtggaggaaatgagatgtaggtcaaaggatgcaaagtagtaaatatgcaggatgaacaagtgaaaagatcaaagatcaaatgtacaacatgaggactatagttaatacatattgtatattgtgttcaggactttttgctaaatgagtagattatacctgctcttgccaatgggggaataatcagtaactatgtgagatgatgggtatgttcattgttccactatagttttactatatatatatatatgtttcatttaacattgtgttgtataccttaatatagacaa

SEQ ID NO: 4982 - DNA, 1285 bp, Homo sapiens
  source 1..1285: mol_type = other DNA
agttgtcttccaaaaggtaatgaaaaatgcatattatgaaaaaattatggagtccaaattttttataccaaaataagctcatactaacttgttataacatgcctgaacaggatgtagtttgaggcactaaaaaggtaagacgtaagtttgaaaagagcacctgtcagagcaacataaattctactaaaattgaagcaaaaccaaacatcaaatttagtgtgaagcttgggtggaagaatggtaaaatcattgatgctttatgagaagtttatggggatgattctccaaaagaaatcagcagtttgcaaacagataactcattttaagaagggatgagatgatgctgaagatgaagcacatagcagcaagccttccacatcgtttgaaaaaaaaattgaaaaaaattatgtccatgccttaattgaagaagaacaagaattaacagcacaaacaatagtcaacaccatagatatctaaattggcttagcttacactattctgactgaaaaattaaagttgagcaaactttccactcaatgggtaccaaaactgttgtgcccagatcagctgcagacaagagctgagctttcaatggaaattttaacaagtaggatcaagatcctgtagcaatttcttgaagaattttaacaggagacaaaacatggctttaccagtatgatcctaaagataaagcacaatcaaagcaatggctaccaagaagtggaagcggtctagtcaaagcaaaactggactggtcaagaacaaagctcatggcaatagtcttttggaatgttaaaggaatttttctagttggttttctggagggccaaagaacaacaacatctgcttattatgaaagtgttttgagaaagccaaagctttagcagaaaaacacctgggaaagcttcattagagagtccttccccatcacaatgcttctgcttattcctctcatcaaacaagggcaattttgtgagagctttgatgggaaatcattaggcattcatccaccttacagtcctgatttggctccttctgacttctttttgtttcaaagtcttaacaaacctttaaattgcacacatttttcttcagttcataacgtaaaaaagacttcattgacctgattaaattctcagaaccctcagttccttagggatgaaccaaatggctggtatcattgcttacaaagtatcttgaactcgatggagcttatgttaagaagtttatattttttacttttaccttttagttcaatttttccataaatttttgaagtcccctc

SEQ ID NO: 4983 - DNA, 904 bp, Homo sapiens
  source 1..904: mol_type = other DNA
acaatgggaaatattttcaaactgctaaagtaaaaagaatgccaactgcaaattctgtatctagcaaaactatccttcacaaacaaaagagaaattatggcatttgaagagtcacaaaaattaaaagaattcaatgctagcagacctgccctacaagcaatactaaagggagtgattcagagagaaatgaatgaatactagacagtaactcaaatgcatgaaaaataaacagcaccaccaaaggtaattaaataattataaaaaacagaatagatctatttgtgtaatacttttcttcacagatctatattaaaagacaactggataaggaaataattacaaaatgtgttgatatgcctatattgtgtagagatctaattggtatagtaataatagcacaaaggacggggagaaaatggaaatatagtgaagcaaatttcctatgctattgaaactaagttgatattaatctgaagccaactatttcaaggtaaaatgttaattttaatatcagggcaaacaataaaaacaaaagtaaacacaaaaaaacattaaaaaatgagtgggagagggacttaaaatggtacccaagaaaatagttgtttaataaaaaagtcagtaatgaagacataagacatggggaaacaaatagcaaaacagcagacattagtgcccccctcatcagtaattacaaacataaatgaaagaatactccaatcaaaagacagagcttggcagaataaatatttttaaaatatgatccagctacatattatctacgaaacacatactttagattaacaggcacaaaaaaggctgacagttaaaaaatggaaaaaagatataccaggcaagcagaaatcaagggaattctggagtagctttaattatgtgacaaaataaa

SEQ ID NO: 4984 - DNA, 194 bp, Homo sapiens
  source 1..194: mol_type = other DNA
ccaggcatagtagctcatgcctgcaatcccagcaccttgggaggcagaggccgggaatcgagatcacttgagtccaggaatttgagaccagcttaggcaacatggtgaaattctgtctctacagaaaaatacaaaaaaattgctgggtgtagtggcgtatgcctgtagtcccaactgctcaggaggctaaggca

SEQ ID NO: 4985 - DNA, 307 bp, Homo sapiens
  source 1..307: mol_type = other DNA
gttggagacctcagtatgctttcaaaaataaaactgggcagaaaaagaagaaaatagaagacttaaacaacactataaaaccatatcacctaaacatacatagaaaatccacccaacaaccacagtatacatattattctcaagtgtacatggagccttcttcaacacagaccatatgctaagtcataaaacaagtctcaattaattttaaaacattgaaaccatacaaagtatgttccccataacaatgaaatgaaattagaaatcaatttaaaaaaagcaatttggggaattcacaaatatgcaa

SEQ ID NO: 4986 - DNA, 303 bp, Homo sapiens
  source 1..303: mol_type = other DNA
tcaggtgctgtggttcatgccaatattcccaacactttgggaggccaaagtaggagaattcctggagcccaggagttcaagatcagtgtgggaaacatggcgagaccccatctcaaccaaaaaaaaaaaaaaaaaaaaaattctaagtgtggtggcacatgcctgtagtcccagctactcaggaggctgaggcaggaggatcacttgagcccaggaggtcaaggctgcaatgagccatgattgtaccactgcactccagcctgggcaacagagtggtactctgtctcaaaataaacaaacaaa

SEQ ID NO: 4987 - DNA, 300 bp, Homo sapiens
  source 1..300: mol_type = other DNA
gtcatataatgaagaataaatctagtctttgtctcctgttcctggtacagagcttagagaggcttggaatttcctgattaatggaagtgtctttgttattcataagaagcccctttggactatatctgagtttatacttgggggtgactcaaggtaggccctcacatagtttgaaaggacgagctggccatgccagacagaccaagcatatggttagagggttggaacttttagccacacccccagatgttcagagattaaagaggagctggagaaggaagttaatcatgtggccaataa

SEQ ID NO: 4988 - DNA, 72 bp, Homo sapiens
  source 1..72: mol_type = other DNA
ttaactctgggtagttagtgtcagaattgaaatgaattgcaggatacccagttggtgtcagacaattggtgt

SEQ ID NO: 4989 - DNA, 301 bp, Homo sapiens
  source 1..301: mol_type = other DNA
gccgggcacggtggctcacccctgtaatcccagcactttgggaggccgaggcaggtggatcacaaggtcaggagatcgagaccatcctggctaacacggtgaaaccccatctctactaaaaatacaaaaaaattagctgagcattgtggcacgtgcctgtaataccaggtactcgggaggctgaggcaggagaatggcatgaacccaggaggcggagcctgcagtgagcctagatcgcgccactgcactccagcctgggcgacagagtgagactccgtctcaaaaaaaaaaaaaaaaagaa

SEQ ID NO: 4990 - DNA, 302 bp, Homo sapiens
  source 1..302: mol_type = other DNA
gctgggcgcagtggctcacgcctataatcccagcactttgggagaatgaggcaggcaaattgcctgagcccaggagttcaagaacagcctggacaacatggcgaaaccccatctccacaaaaaattagccaggcaatgtggtgcatgcctgtagtcccagctacttggaaggctgaggtgggagaatcacctgagcccaggaagtcaaggctgcagtgagctgtgaccatgccactgcactccagcctgggtgacagagcaagaccctgtctcaaaaagtaaaaaataaaataaaataaaaa

SEQ ID NO: 4991 - DNA, 6135 bp, Homo sapiens
  source 1..6135: mol_type = other DNA
gggggtggagccaagatggcaaaataggaacagctccagtctagagctcccagagtgagcgacatagaagatgggtgatttctgcatttccaactgaggtactgggctcatctcacaggggagtgttggaaagtgggtgcaggacagtgggtgcagcgcaccgtgtgtgagccgaagcagggcgaggcatcgcttcaaccgggaaacgcaaagggtcagggaaatccctttcctagtcaaagaaaggggtgacagatggcacctggaaaatcgggtcactcccacccaatactgcacttttccaatggtcttagcaaacagcacaccaggagattatatccctcgcatggctcagacggtcttatgcgcacaaagccttgctcactgctagcacagcagtctgagatcaaactgcaaggtggcagcgagggaggggtgcgcgccattgcggaggcttcagtgggtaaacaaagcagctgggaagctcgaactgggtggagcccaccacagctcaaggaggcctgcctgcctctgtagactccacctctaggagaagggaatagtgaaacaaaaggcagcagaatcctctgcagacttaaatgtccctgtctgacagctttgaagagagtagtggttctcccagcatgcagctggagatctgagaacggacagactgcctcctcaagagggtccctgacccccaagtagcctaactaggaggcaccctccagtaggggcagactgacatctcacagggccgggtattcctctgagacaaaacttccagaggaacgatcaggcagcaacatttcctgcccaccagtatctgctgttctgcagcctccactcctgatacccaggcaaacagggtctggaggggacctccagcaaactccaacagacctgcagctgagggtcctgactgttagaaggaaaactaacaaacagagaggacatccacaccaaaaccccatctgtacatcaccatcatcaaagaccaaaggtagataaaaccacaaatatgggggaaaaacagagcacaaaaactggaaactctaaaaatcagagtgcttctcctcctccaaagcaacacagctcctcaccagcaacggaacaaagctggatggagaatgactttgacgagttgagagacgaaggcttcacacgatcaaactactctgagctaaaggaggaagtttgaacccatggcaaagaagttaaaaaaaattgaaaaaaaattagacgaatggctaactagaataaccaatgcagagaagtccttaaagaaccagatggagatgaaaaccaaggcaagagaactacgtgaagaatgcacaagccgcaagagccgactcgatcaactggaagaaagggtatcagtgatggaagatcaaattaatgaaatgaagtgagaagagaagtttacagaaaaaagaataaaaagaaacgaacaaagcctccaagaaatataggactatgtgaaaagaccaaatctatgtctcattggtgcacctgaaagtgacagggagaatacaacccagttggaaaacactgcaggatattctccgggagaacttccccaatctagcaaggcaggccaacattcaaattcacgaaataaagagaacgccaaaaagatactcctcgagaagagcaactccaagacacataattgtcacattcaccaaagttgaaatgaaggaaaaaatgttaagggcagccagagagaaaggtcgggttaccctcaaagggaagcccatcagcctgccagctgatctctaggcagaaaatctacaagccagaagagagtgggggccaatattcaacattcttaaagaaaagaattttcaacccagaatttcatatcagccaaactaagcctcataagtgaaggagaaataaaatactttacagacaagcaaatgctgagagattttatcaccaccaggcctgccctaaaagagctcctgatggaagcactaaacatggaaaggaacgaccggtatcagcaactgaaaaaacatgccaaattgtaaagaccgtcaaagctaggaagaaactgcatcaactaacgagcaaaataagcagctaacatcataatgacaggatcaaattcacacataacaatattaaccttaaatgtaaatgggctaaatgctccaattaaaagacacagactggcaaattgcataaagagtcaagacccatcagtgtgctgtattcagaaaacccatctcacgtgcagagacacatataggctcaaaataaagggatggaggaagatctaccaagcaaatggaaaacaaaaaatggcaggggttgcaatcctactctctgacaaaacagactttaaaccaacaaagatcaaaagagacaaagaaggccattacataatggtaaagggatcaattcaacaagaagagctgacaatcctaaatatatatgcacccaatacaggagcacccagattcataaagcaagtccttagagacctagaaagagacttagactcccacacaataataatgggagattttaacaccacactgtcaacattagacagatcaataagacagaaagttaacaaggatatccaggaattgaactcagctcagcaccaagcagacctaacagacatctacagaactctccaccccaaatcaacagaatatacattcttttcagcaccacaccacacctattccaaaattgaccacatacttggaagtaaagcactcctcagcaaatgtaaaagaacagaatttataacaaactgtctctcagaccacagtgcaatcaaactagaagtcaggattaagaaactcactcaaaaccactcaactacacggaaactgaacaacctgctcctgaatgactactgggcacataacgaaatgaaggcagaaataaagatgtcctttgaaaccaaggagaacaaagacacaacataccagaatctctgggacgcattcaaagcagtgtgtagagggaaatttatagcactaaatgcccacaagagaaagcaggaaagatctaaaattgacaccctaacatcacaattaaaagaactagaaaaggcagagcaaacactttcaaaagctagcagaaggcaagaaataactaaaatcagagcagaactgaaggaaatagagacaaaaacaacccttcaaaaaattaatgaatccaggagctggttttttgaaaagatcaacaaaattgatagaccactagcaagactaataaagaagaaaagagagaagaatcaattagatgcaataaaaagtaataaaggggatatcaccaccgatcccacagaaatacaaactaccatgaaagaatactataaacacctctatgcaaataaactagaaaatctagaagaaatggatgaattccttgacacatacaccctccaaagactaaaccaggaagaagttcaatccctgaatagaccaataacaggctctgaaattgaggcaataattaatagcttaccaaccaaaaaaagtccaggaccagatggattcacagccgaattctaccagaggtacaaggaggaactggtaccattccttctgaaactattccaatcaatagaaaaagagggaatcctccctaactcattttatgaggccagcatcatcctgataccaaagcctggcagagacacaacaaaaaaagagaaatttagaccaatatccctgatgaacatcgatgcaaaagtcctcagcaaaatactggcaaaccgaatccagcagcacatcaaaaagcttatccaccatgatcaagtgggcttcatccctgggatgcaaggctgattcaacatacacaaatcaataaacgtaatccagcatataaacagaaccaaagacaaaaaacacatgattatctcaatagatgcagaaaaggcctttgacaaaattcaacaacacttcatgctaaaaattctcaataaattaggtattgatgggacgtatctcaaaataataagagctatctatgacaaacccacagccaatatcatactgaatgggcaaaaactggaagtattccctttgaaaactggaacaagacacggatgccctctctcaccactcctattcaacatagtgttggaagttctggccagggcaatgaggcaggagaaggaaataaagggtattcaattaggaaaagaggaagtcaaattgtccctgtttgcagatgacatgattgtatatctagaaaaccccttcgtctcagcccaaaatctccttaagctgatgggcaacttcagcaaaatctcaggatacaaactcaatgctcaaaaatcacaagcattcttatacaccaataacaaacaaacagagccaaatcacgagtgaactcccattcataattgcttcaaagagaataaaatacctaggaatccaacttacaagggatgtgaaggacctcttcaatgagaactacaaaccactgctcgatgaaataaaagaggatacaaacaaatggaagaacattccatgctcatgggtaggaagaatcaatatcatgaaaatggccatactgtccaaggtaatttatagattcaatgccatccccatcaagctaccaatgactttcttcacagaattggagaaaactactttaaagttcatatggaaccaaaaaagagcccacagtgccaagtcagtcctaagccaaaagaacaaagctggaggcatcatgctacctgacttcaaactatactacaaggctaccgcaagtaaaacagcatggtactggtaccaaaacagagatatagaccaatggaacagaacagaaccctcagaaataatgctgcatatctacaaccatctgatctttgacaaacctgaaaaaaacaagcaatggggaaaggattccctatttaataaatggtgctgggaaaactggctagccatatgtagaaagctgaaactggatcccttccttacaccttatacaaaaattaattcaatatggattaaagacttacatggtagacctgaaaccataaaaaccctagaagaaaacctaggcaataccattcaggacataggcatgggcacagacttcatgtctaaaacaccaaaagcaatggcaatgaagctaaagttgaccattgggatctaattaaaccaaagagcttcttcacagcaaaagaaactaccatcagagtgaacaggcaacctacagaatgggagaaaatttttccaatctacttatctgacgaagggctaatatcctgaatctacaatgaactcaaacaaatttacaagaaaaaacaatcccatcaaaaagtaggcaaaggatatgaacagacacttctcaaaagaagacatttatgcagccaaaagacacatgaaaaaatgctcatcatcactggccatcagagaaatgcaaatcaaaaccacaatgagataccatctcacaccaattagaatggcgatcattaaaaagttcggaagcaacaggtgctagagaggatgtggagaaacaggaacacttttacactgttggtgggactgtaaactagttcaaccattgtggaagtcagtgtggcgattcctcagggatctagaactagaaataccatttgacccagccatctcattactgggtatatacccaaaggattataaatcatgttgctataaagacacatgcacacgtatgtttattgcggcactattcacaatagcaaagacttggaaccaacccaaatgtccaacaatgatagactggattaagaaaatgtggtatatatacaccatggaatactatgcagccataaaaaaggatgagttcatgtcctttgtagggacatgaatgaagctggaaaccatcattctcagcaaactatcgcaaggactaaaaatcaaacaccgcatattctcactcataggtgggaattgaacaatgagaacacatggacacaggaaggggaacatcacacaccggggcctgttgtggggtagggggaggggggagagaaagcattaggagatatacctaatgttaaatgacgagttaatgggtgcagcacaccaacatggcacatgtattcatatgtatctaacctgcacgttctgcacatgtaccctaaaactttaagtatataaaaaaaaagaa

SEQ ID NO: 4992 - DNA, 1356 bp, Homo sapiens
  source 1..1356: mol_type = other DNA
tttaaattttttgagccttcctaaaagccagatgttatcagcagctgaacagcatctacagaaaccagctgcaaagacagaagcagaacaactggtttggtggaaatatccaataccaaaaagttgagaaatcggtaaaataataacttggggtagaggttatgcttgtgtttctccaggccaaaatcaacactgatttggataccctcaggacacctgaaaccttatcatgaaccagatgctgaggaagagattctgggaggatcccgagtaccccccagttgcagtcatgtcaagactgatgctcaggaggatcccaactgtcatgagcaacacccatcgaacacagccatccacctgggaacagatcaagaagctgtcacagatggtgggagaaaacctgaggaaagcgggacaaccagtcacaatgagtaatttaatggtagctatgatagcagtgatcaccattgccgtgagtattccttcaacaagggctgacacagagatcagttatacttattgggcatatttgtcaattttggctggcaataatgcctggatataatcactttatgacacagttacacatgctttctggtctcaatatttaccataataagtctgcttctataattgaggcataccaccctcaaaaatctatttgtaaacaaaattgaacctggccagaaaaaatgaatgtacttttttaggaaggttgcattgcagaacaggcagaggtgctgcacaacgaatcctatggaatcattattgattggtcccctaaggggatgtttagcttgaattgcacctcttagtctgcatgtcacagccacactgtgttcaactggtctgaacagaatggtcagatggtacaaatggtaagacgtatggcaagagttcctattatctggaaccatggcagtataggggcacctcaacctcaaatgatatggcccattgtaggagctaaacataaggatttgtggcaactgttaatagctcttaataagatcaaaatttgggaaagaataaaaaagcatctagaaggacactctgcaaacttgtctttggatattgcaaaatatatatatatatttaaagcatcccaggcacacctgaccttaatgccagaactggagtgctcgaaggagctgcagacagattagcagctagtaacccattaaaatggataaaaacacttagaagctctgtgatttcaatgatgattgtgcttttaatctgtgttgtttgtctttatatagtctgcagatgctgatcttgactcctgtgagaagtagctcaccgtgacaaagctgcctttgcttttatcgctttgcaaaacaaagaagggggaca

SEQ ID NO: 4993 - DNA, 1641 bp, Homo sapiens
  source 1..1641: mol_type = other DNA
aagatggccatctttattcagctgcaaagggtcactcccacatacagagactaggatttcagctaaactagcataatttgaacagatctttggagaaaaaaaatgttaaatgtggatggagaatagatgcagaagctgacactgatgagggaggaagctgagagcactacatgtggtgcctaaatgttagggctggttcctagccccaaacagctactggggaaggagcaagtgaagcaactgagagagtgttcaccatcaccacggacctctgagatcctatctgtaggggattccacatccttccacaaatatttgagctggcaggaggatctccgtggagattagatagagatggaactgcagcaggcacaaagccagggactttgtatacaggatagctccagcagagcctgaccataagcattcatttttcagagcacttcatctccctctaagaggagctggccctagataactgccagggaaaaagcaaggctagcttccctatgagactggtgcatgtctgtcctgcatgcctgctgccagccactcccagggctcctggctggccacccacaagaacaagttcagagtacagccctcttgcccaacctcggtgctttgctccatctgagtgcattccagcaggctgggagccctctgagttttacaaaatacccagaatttaaactccagagtctggaggaggaagccacgagtagttcctggtgcccatggctgaagcctgtggatcaggagttctgagccaggatctgtgcccagcactcaagtgggagaggaacaagcactctccagaacctgagagaggtgagtcatttaggtttgcaggctggtttgggaactaggcatgcctctctccataagatcacctggtaagtgtctggcctatttctttaccagacttctgctcaaaggagccctgtggcttgaaactcttaacagcaacaaaaaaattgagggcccagtgctagtgatctgaggtggctccctgaaagctcagaagtggacctggtgagtagatcacctccctgtcccatagagcacagcttcaaatgcaaagaggaacaaaggagtcacatgactgaatatgagcctatgtaccacccattgctctcaagcatcatctactggattgcagtccaaaccacaacaccaaaaaacactgctaattttaccctttggaaaatcaaggataagaagttaacaaaaaacaaagactctgtacaaagctttaattagccttctgaaaactcaaaacgaagccaagtgactatactcaatttaaaccacaaaaaaagaacaccaaccctcccagaagagaaagaatcagcacaagatctttggcaattaaaaaagccaaagtgtccccttacctccaaatgggcctgcttgctccccagcaatggttcttaaacagcccgaaatgtctcaaatgatacacatggaattcagaatgtggctggcaagaaaggtcaccgaaatccctgggaaaaattgtaactcaatccaaggaagccaagacatcaagtaaaatgattcaagagcttaaagttgaaaaagccattttaagaaagacccaaactgaacttttgagctgcaaaattcactacaagaatt

SEQ ID NO: 4994 - DNA, 4968 bp, Homo sapiens
  source 1..4968: mol_type = other DNA
gtggctggcaatatggctgaataggaacagctccagtctgcagctcccagtgatatcaacacagaaggtgggtgatttctgcatttacaactgaggtatctggttcatctcattggaaatggttagacagtgggtgcaacccatggggggtgagtggaagcagggtggggggggtcaccttacctggaaagcacaaagagtcaggaaactccctcccctagccaaaggaagccgtgagagactgtgccgtgaggaatggtgcactctggcccagatactatgcttttctcacagtctttgcaaccacagaccaaaaaattcccttgggtgtcaacgccaccaggactctgaatttcaagcacaaaactggaaagccatttgggcagacaccgagctagctgcaggagatttcttttcataacccagtggtgcctggaacaccagcaagacagaaccatccaccacagagccaagcaagctaaaacccactggcttaaaattctcactgccaggacagcagtctgaagtccacctgggatgctcgagcttggtaggggaagaagcatccgccattaatgaggcttgagtaggcagttttaccctcacagtgtaagcaaagcccctggggaacttcgaactggatggagctcactgcagctcagcaaagctgcagtagccacactgcctctctggattcctcccctcggggcaagggatcacggaaaaaaaggtggcagccccagtcaggggcttatagataaaacccccatctccctggtataaagcacttggggaaaaaggtggctgtgggtgcagattcagcagacttaaacatccctacctgccagctctgaagagagcaacagacctcctagaacagtgttaagctctgcaaagggacagactctctcctcaagtgggtccctgaaccccctgcctcctgactgagagacacctccaagcaggggtcgacaaacacctcatacaggagagctccagctgggatctggcaggtgcccctttgggacgaagcttccagaggaaggaacaggcagcaatctttgctgttctgcagtccctgctggtgatacccaggcaaacagggtctggagtagacctccagcaaactccagtaaacctgcagtaaaaggcctgagtgttagaagaaaaatcaacaaacagaaaggaatagcataaacatcaacaaaaaggacgtccactcagaaaccccatcagaaggtcaccaacatcaaagaacaaagatagataaatccacaaagatgaggaaaaaacagcacaaaaaggctgaagattccaaaaaccagaacacttcttctcctccaaaggatcacaattcctcaccagcaagggaacaaaactggaaaaaaaatgagtgtgacaaattgacagaagtaggcttcagaaggtgggtaataacaaactcctccgaggtaaaggagctagttctaaccaaatgcaaggaagctaagaaccgtggaaaaagggtagaggaattgctaactagaataaccagtttagagaagtaaataaatgacctgatggagttgaaaaacacagcatgataactttgtaaagcatacacaagtatcaatagctaaattgatcaagagaaagaaaggatatcagagattgaagatcaacttaatgaaatatagcgtgaagacaagattagagaaaaaagaacgaaaaggaacacacaaagcctccacaaaatatgggactatgcaaaaagaccaaaccaacgtttgattggtatacctgaaagtgacaaagagaatggaaccaagttggaaaacactcttcaggatattatccaggaaaacatccctaacctagcaagacaggaaaacattcaaattcaaaaaatacagagaacaacacaaagatactcctcgagaagagcaaccacaagacacaaataaccagattcaccaaggttgaaatgaaggaaaaatgttaagggcagccagagagaaaggtcaggttacagacaaagggaagtccatcagactaacagtggatctctcttcagaaacactacaagccagaagagagtgaggccaatattcaacattcttaaaaaaaagaattttcaacccagaatttcatatcaagacgaactaagcttcataagtgaaggagaaataaaatcctttacagacaagcaaatgctgagagattttgtcatcaccaggcctgccttacaagagctcttgaaggaagcactgaatatggagagcaacaactggtatcaactactgcaaaaacataccaaattataaacaacatcgaaactatgaagaaactgcatcaactaatgggcaaaataactagctagcatcataatgacaagatcaaattcccacataacaatattaaccttaaatgtaaataggctaaatgacccaattaaaagacacagactggcaaattggataaagagtcaaggcccatcggtgtactgtattcaggagacccatctcatgtgcaaagacacacataggctaaaaataaagagatggaggatatttaccaagcaaatggaaggcaaaaaaagcaggggttgcaatcttggtctttgataaaacagactttaaatcaacaaagatcaaaagagagaaaaaaggcattacatactggtaaaaggataactgcaacaagagctaactatcttaactatatatgcacaacaatacagaagcacccagattcataaagcaagttcttagagacctacaaagagacctagactcccacataataagagcagaagactttaacagcccactgtcaattttagacagctcgagacagaaaattaacaagtatattcaagacttgaactcagttctggaataagcaaaactaatagacatctacagaactctccaccccaaatcaacagaatatgcattcttctcaacatcacatcgtacttattgtaaaatagaccacataattaaaagtaaaacactcctcagcaaatgcaaaaaatggaaaccataacaaacagaccacagtgcaatcaaataaaaatttgggattaagaaactcactcagaaccgcacaactacatggaaactgaacaacctgctcctgaatgactactgggtagaaaacaaaataaaggcagaaacaaataagtttttgaaaccaacaagaacagacacaacgagccaaaattcttggacatagctaaagcagtgttcacaggaaagtttatagcactaaattcctagaaaagaaagcagaaaatatctacaatcgacaccctaacatcacaatgaaaagaactaatgaagcaagagcaaacaaattcaaaagctagccagaggcaaaacataactaaggtcagagcagaactgaaaaagatagaaatagggaaacccctttaaaaatcaacaaatccagggactgtttttttgaaaagatcaacaaaatagatagaccgctagccagactaagaaaaaaagagagaagaatcaaatagacacaataaaaaacgataaaggggatatcatcactgattccacagaaatacaaactaccatcagagaatactataaacacctccatgcaaataaactagaaaatctagaagaaatggataaattccttgacacatatactctttcaagtctaaaccaggaataagttgaattcctgaatagaccaataacacgttctgaaattgaggcagtaattaatagcctaccaaccaaaaaagtccacagccagacggattcccagctgaattctaccagaggtgcaaagaggagctggtgccattcttctgaaatcgttccaaacaataaaaaaagagggaatcctccctaactcattttatgagaccagcatcatcctgatataaaaacctggtagaggcaaaacaaaaaaagaaaatttcaggccaatatccatgatgaacatcgatgccaaaatcctcaaaaaaatactggcaaaccaaatccagcatcacatcaaatagcttatccaccactatcacgtcgacttcatcctgggatgcaaggctgattgaacatatgcaaatcaataaaggtaatccatcacataaacagaaccaacgagaaaaacaacaggattatctcaatagatgcagaaaagacctttgataaaattcaacgccccttcatgctaaaaactctcaataaactaggtattgatgtaacgaatctcaaaataagaagagctatttatgacaagcccacagccaatatcatactgaatgggcaaaaactggaaacattccctttaaaaaccagcacaagacaaaaatgccgtctctcactcctcctattcaacatagtattggaagctctggccaggtaaatcaggcaagataaagaaataaagcatattcaaataggaagagaggaagttaaattgtctctgtttgcagatgacatgactgtatatttagaaaaccccaacgtctcagcccaaaacctccttaagctgataagcaacttcaacagtctcaggatacaaaatcaatgtgtaacaatcacaagcattcctatacaccaataatagagagccaaatcatgagtcaacttccatttaaaattgctacaaagagaataaaatacctaaaaatacaacttacaagatatgtgaaggacctcttcaaggaaaactacaaatcactgctcaaggaaataagagaggacacaaacaaatggagaaacattccatgctaatggataagaaaaatcaatatcgtgaaaatggccacactgcccaaagtaatttatacattcaatgctatctccattaagagggcattgaccttcttcacagaattagaaaaaaactactttaaacttcgtatgaaaccaaaatagagcccacatagacaagataatcctaagcaaaaagaacaaagatggaggcatcatgataaatgacttcaaattatactacaag

SEQ ID NO: 4995 - DNA, 292 bp, Homo sapiens
  source 1..292: mol_type = other DNA
ggccgggcgcggtggctcacgcctgtaatcccagtactttgggaggccgaggcgggcggatcacctgagatcaggagtttgagaccagcctcaacatggagaaaccccgtctctactaaaaacacaaaattagccaggcatggtggtgcatgcccataatcccagctactcaggaggctgaggcaggagaattgcttgaacctcggaggcgcaggttgtggtgagccgagattgcgccattgcacgccagcctgggcaacaagagcgaaactctgtctcaaaaaaaaaaaga

SEQ ID NO: 4996 - DNA, 203 bp, Homo sapiens
  source 1..203: mol_type = other DNA
agtcagaaggcctaggttctagtcctagctccatcatttaccaactgtgtgaccttacttcacctcttagccttgttctcctcactagcagtaggaaagtaacacctaccctgcctacctcacagggctgttgtgagggttcaattggtatatgtgaaaattctttcagaattgtaaaatgctatatgactgtaaggaattat

SEQ ID NO: 4997 - DNA, 60 bp, Homo sapiens
  source 1..60: mol_type = other DNA
ttgatcctgtcttatatgtgacatcctcagcaacaagctaaaatgatctgaattatacca

SEQ ID NO: 4998 - DNA, 4184 bp, Homo sapiens
  source 1..4184: mol_type = other DNA
ggacaggatggtcgactagaaagagctgtggttggaggctcccaccaagaagaaccaaaagggcgagtgaatcctgcaccagtaactgagatatccagcttctctcactggaactaattaggtagttggtgtgacccacagacagtcagtgagagcagggtagtgtgacagcccaaatgagagccacatggggcaagggaagctcccacccccagccaagggaagtggtgagtgattgtgctaccctgcatgggaaatggtgctttttttcatagatctgtgcaacccacagataaggagatcccacttgtgggcccatgtcaccagggccttgggtctcaagcacagagctgtgcagattctcagtggctatttggctggagactgcctaaggctactgcgttcccaaggggagggacagccatcatcactgtggctgcttgctgcctaagacaactgagctccctggaggaggggcagcagccatcactgaagctccagtctgcaatttttcccctgctggtggtggggagacaggatggtttgagcccagcaggaatttcacagagctacagcacaccagctgtggcatatcatgccagactgcctctttaggctggcccttgacccattctttctcactggatggggactccctgcaggaatttcagcaaccccagccatggggtatagggacagaattctgatccccctgggactgagcccctgtgtggctgtggtctctgtgtattagcagacttagtctttcccctgctgactctaaaaaatctggacagtccagatgagtgggctcctcagagtgcagcacactgtctccaccaaggggcagcccgagtgctagttaagtgggtcctagattctgtgccccttggctaggcgggaccccccaacagggtttgccagataccttatacaggaacattcctgctacaacaggtctgtgtccctcagggacagggatcccagaggaaggagaaggcagccatctttgctgttctgcatgtcaggtgacatgtccaggggggaagagagccaggtgaatagtgcctgaagtggacacccagaaaactgcaacagccctacggaagaggaacctcactgttaaaagaaaaacaaacaaacagaaagtgacaacattcacaaaatgtccccacaaaaactacatccaaagttaacagcctcaaagatcaaaattagagaaactcatgaaaatgagaaagaatcaaagtaaaatcacagaaaattccaaaagcccaaatgcctattatcctccaaatgattgcaacacctctccagcaagggcacagaactgatgcggaagctgaaatggatgaattgacagaagtaagcttcagaaggtgggtaataacaaacttaactgagctaaaggagaatgttcttacccaatacaaagaagctaaggaccaccataaaacattataggagttgttaaccagaataaccagtgtagagaagaacattaatgacctgatggagctgaaaaacacaacatgagaacttcacaataaaaccacaagtatcaataagagaatagaccaagcagagaaaataatttcagagctcggagactatcttgctgaaataagacaggcaggcaagattagaggagaaaaaaaaagaaaagaaaaagaaaaaagaaaaggaatgaacaaaacctccaagaactatgggattatataaaaagactgaacttatgacagattggggtacctgaaagagatggggaggatggaaccaagttggaaaatatacttcaggatatcatccaaaagaacctcctcaacctaacaagataggcaaacattcaaattcagaaaatctggagaacccaagtaagaaactctatgagaaggtcaagcccaagacacaatcattagattctccaaggtcgaaatgaaggaaatcatgttaagggcagccagaaagaaagaccacgttacttacagagaaaagcccattagactaacagcagacctctgagcagaaaccctacaaaccagaagagattgaagtccaatattcaaaattcttaaagagaataatttacaacccagaatttcatacccagccatactaagcttcataaccaaagtggaaataaaatccttttcagacaagcaaatgctgagggaattcatcaccaccaggcctgccttacaaagagctcctgaaagaagcactaaatgtagaaaggaaacaccattaccagccactgcaaaaacacactgaaatacaaggacaaatgacactacgaagcaactgcatcaacaagtctaaaaaataaccggctaacatcatgatgacaggaccaaattcacacatagcaatattaaccttaaatgtaaatgggctaaatgccccagttaaaatacacggaatggcaaactggataaagagtcaagaaccattggtgtgccatattcaagagacccatctcacatgtgaagacacacataggctaaaaataaagggatggaggaaaacttaccaagtaattggaaagcagaaaaaaagcaggggttgcaatcctagtttatgacaaaacagaatttaaactaaaaaagataagaaaaaacacaaagaagggtatgacataaaataaaggcatcaattcaacaagaagagctaactgtcctaaatatatattcacccaatacaggagcacccaaattcacaaaacaagtgcttagagatctccaaagagacttagacttcacacaattatagtgggagactgtaacacctcattgtcaatatgagacagatcatcgagacagaaaaataacaaggatattcaggactttaactcagctctggatcaagtgaacctggtaaatatctatagaactctccacccaaaaccaacagaatatacatttttctcagagccacatggcacttactctaaaatctatcacagaattggaagtaaaacactcttcagcaaatgcaaaagaactgaaatcataacagtctctcagaccacagtgcaatcaaattagaactcaagattaagaaactcacacaaagccacacaaacacatggaaattgaacaatctgctcctgaatgactctgggggtaaataataaaattaaggcagaaatgaagaagttatttgaaaccaatgagatcaaagagaccatgtaccagaatctctgagacatagctaaagcagtgttaagaggtaaacttatagcactaaatacctacattgaaaagctaaaaggatctcaaatcagcaccctaacatcccaaaaaaaagaactagagaatcaatagcaaagaaacccaaaagctagcagaagacaagaaacgattaagatcagagaagaattgaaggagatagagacacaaaaaaactttcaaaaaaccaataaatccaggagctggtttttaaaaaaataataaaatggatagactgctggctagactaataaaaaagaaaaaaataataatcaaactgacactacaaaaaatgataaaaaggatatcaccactgatcccacaaaaatacaagcaaccatcagcaaatactatgaacccccctatgcaaataaactagaaaatctggaagaaatgaataaatttctggacacatacaccctcccaagactaaaccaggaagaaattgaatccctggagagaccaacaaaaagtttgaaattgagggagtagtaaaaagtctaccaaccaacaaaagcccagaatcagatggatttacacctaaattttaccacaggtacaaacaagagctggtaccatttcttcagaaactattccaaacaattgaaaaagagagactcctccataactctttttatgaggccagcttcatcctgataccaaaacctggcagagatacaacaaaaaaagaaaactttaggccaatatatttgaagaacattgatgcaaaaattctcaaaaaattactggcaaatggaatccagcaccacctcaaaaagcttatccaccatgataaatttggcttaattcctgggatgtaaacctgattcaacatatgcaaatcagtaaacataattcattgcataagtagaactaaaggaaaaactacatgattatctcaatagatgcagaaaaggccttcaataaaattcaacatctcttcatattaaaaattct

SEQ ID NO: 4999 - DNA, 3321 bp, Homo sapiens
  source 1..3321: mol_type = other DNA
gagctagatggccgaagagaacctccaatgatggtctcgcctcccctgcaggaacaccaagttaaacaactcttcacacaagaaagcaccctaatatgaaccaaaaccaggtgagttacgacagcacctggtttgaacttcatatcaagaaaggagccactgaagagggtaggagagacagtcttaaattgcctacactacccgcccccattgcccacggtgccacattggggcagggataatctatgtgcttgagggaggggaaagcaaagtgattgtaggacttcacattggaacgcagtgccgacctgtcacagcaaaaatcaacacaaggcagaatttatactgggtccatagagggagcacttaaacaagtgattagactggaacttgagttatggctagccccagcattgcaggctaaagtgttatgggatcctaaaatttgaaaagcagtctaggtcacaaagactgtagttcctgggtaagtcctggtgctgttctgggctcaaagtcagtggacttggggtggatgcaacccagtgagatctggagcagcctaaggagtgcttgtgtcactgtcacccctcctgcaacttcaggccgtgctgcttgcagctgtgggagagactccttatgcttgaggtagggaaagagaaaagtagagaactttatcttgcaatctggagaccagttgagctacagtaaaataaatcaccaagcagagccctaaagaccccatccaggccccacctcccagacagcatttctagatccactctgggcatcacggaaacctgctactccaaggggaaggacccagtcctggcaggatttatcacttgctgactaaagaacccttcagccatgaataaacatcaatgatagctaggtagtaatcaccataggacttggatgagacctaatgccatattggcttcatttgtgacccagcacattctcagctgtggtggtccttggaagagacttctgcttgaggaaaggagagggaagaaaaaagggacttttgctttcaccttgagtaccagctcagtcacagtgtgacccagcacattcccagctgtagtagccattgggagagatttcttcttgagaaaaagagagggaagagtaaaaaggactttggcttttcacttgggtaccagctcagtacagtaaaatcaacaagcaaactcttaagatccccaattccaggccttagctccttgatggcatttatagaccaaatgtgggccagaagggaacttgctgccctcaaaggagagatctaggcctggcaggagtcactacctgctgactaaaaagcccttgggccttgaataaacaccagtggctgccaggtagtagtatccatggcactgggacagtagcgatcatggggtgagactcctacttgaggaaaggatagggaagagtaaaaaaaaaaaattgtctttcaaattgggtaccagttaagccacagtaaaacaaagtacacagtatattcctaaagttcctgattccatgccccagctcccacgtgccatctctagacacaccctgggatagaagggactctactgccttgaagggaaagacatatgcctggcaatagtcaccacctgctggctagagagcccttgggccttgaataaacattagcagtagacaggcactagttatcaccatccttgggtgaaaacaaatagtgtgctggctttagttgtgaaccaacatagtcccagtggtgaatgccatgggagtgcctgtatcacaccctcctcaattccaggcagctcaacacagagaaagaggcttaatttgcttgggaaaaagtaaggaaagagaacaagtgactttgcctagtaatccaggcaatctccctgattttaaccaagaccaccaagttggtacctctgtgagtctgcgagtcacagttactgagcatgggatattcctaatacagatatggctgcagtgatcaaagtcttagattacaatgctcaattccctttgaataactgaaaaaattcttctcaagaaggacaagagcacataagcccaaactgtgaagatcagaataaatacttaacttttcaatgcccagacattgaaaaacatttaaaagaaggatcaagaccatccaggaacacaggacctcatcaaaaataaaaacaaaatctaaataagacaacaatgatcaatccaggggtgaaagagatgtgtgacctttcggagagatagttcaaaataactgtttgaaatggtcaatgaaattcaagataacacagagaagaaatacagaatgctaccagataaatttaacaaagaaagtgaaataattaaaaaatcaagcagaaattccagagctgaaaaattcaattgataaactgaagaatgcatcagagtctctcaacagtagaattgatcaagcagaagaaagaatgagtgagcttgaaaacaggctatttgaaaatacacagtccaaaggagacaaaaaaaaaaaaaaggaatgaagcacacctacaagggcaaatgtaagttattggcctcaaaaaggaggcaaagagataagggtagaaagtttattcaaagagataatagtagataactttccaaaccagagaaagatactagtattcaagtacaaggaggttatagaacaccaagcagatctaactgaagacatttaagaatcaaactcccaaaggtcatggataatgaaaggatgctcaaagcaacaaggaaaaagatacaaataacacatgaaggattcttaatatgtctggcagctgactttcctagacaaacaaaagcttagacagactttcttagacaaacaaaagctgaaggagttcatcaacatcagacctgccctgaaagatctgatgttgatgaactcctcctgctaaaaggacagaactcctcctgctaaaagttctgcagtacaaaagaaaaagacattcatgagcaacacatattcatcctggggtacaaaagtcactggtaatagtaagtacaccgacaaatacagaatagtataacactgtaattgtggtgtgtaaactactcatcttgagtatgaagatgaaaaggcaaacctatcaataataactgcaacaacattttaagatatatgtattatgataatatgtaaatagaaatgaaacaagttaaaaagtgtggagcttttattagttttttgcttgcttattttttagtttctttacttttcaattagagttaaattaccatcagtttaaaataataggatataagatgttatttgcacctaatggtaacttcaggaaaaaaaaaata

SEQ ID NO: 5000 - DNA, 3058 bp, Homo sapiens
  source 1..3058: mol_type = other DNA
acacacatacataaaatagaaaacataaaaaacaattacaacttctggaagtgaaggacacatttacagaattgcaaaatgcactggaaagtctcagcaatagaatcaaacaagtagaagaaagaatgtcagagcttgaagacaagtgtatcaaattaacccaatccgacaaagataaagaaaaaaattattttaaaaaaatgaacaaagccttcaagaagattgggattatgttaaatgacaaaacagatgattagtttgtgttcccaaagaagagaaatctaaaagtttggaaaacatatttgaggggataatcaaggaaaacttccctggccttgctagagatctagacagccatacacaagaagctcaaagaacatctgggaaatttatcacaaaaaaatcatcgcctaggcacatattcatttggttatctaaagtcaaaacaaaggaaataatcttaagaactgtgagggaaaagcaccaggtaacctaaaaaggaaaacctgtgagagtaagagcagatattttagtagaaactctacaagctagaggggattgaggccttatctttagcctccttaaacaaaacaattagtcaagaattttgtatccagtgaaactaagcttcataaatgaaggaaagatagagtcttttttagacaaacaaatgctgagagaatttgccactatgaagccagccctacaagaactgctaaaaggagctctaaatcatgaaagaaatcctcacaatacagaaaaatagagtctccttaaagtatacatctcacaggacatataaaacaataacagtgaaaaaaataccaaggtattcaggcaattaatagcacaatgtatagaatagtacctcacatctcaatagtaacggtgaatgtaaaatggcctaaatgctccacttaaaagatgtagaatggcaaaattgataagaactcactaattaatatctgctgtcttcaagagactcacctgacaaataaggactcaaataaacttaaggtaaaggagtggaaaaaagatagtccgtgaaaatggacacaaaaaaatgagcaggaatagctattcttatatcagacaaaacaaactttaaagcaacaacagttaaaaaagacaaagagggaccttatgtaatgataaaagaactagtccaacaggaaaatatcacaatcctaaatatatatgcacctaacactggagctcccaaattcataaaacaattactaccagacctaagacataagatagacagcaacacaataatagtgggggacttcagtactccattcacagcactagacaggtcatcaagatagaaagtcaacacgaaccaatgaacttaaactataccccagaactaatggacttagatatttacagaacattctacctaacaactgcagaatatgcactgtattcatcagcacatggaacattctccaagatagaccatatgacaaaacaagtctcagtaaaagccacaaaacaagtctcagtaaatttaagaaaattgaaattttatcaagtactctgtcagaccacagtctaataaaattggaaatcaactctagaagaaaccctcaaaaccatgcaagtacatggaatttaaataacatgcttctgaatgatcattgggtcacagtgaaatcaagattgaaataaaaaattatttgaactgaacaataataataatataacctctccaaacctctaggaaacagaaaagtggttctaagaggaaagttcatagcattgaatgcctacatcaaaaagtctgaaagagcacaaatagacaatctagggttacacgtcaaggaactagagaaaaaacaacaaacaaacccagcagaagaaaagaaagaccagaactaaatgaaattgaaacaacaacaacaaaaaaatacaaaagagaaaacacacagctggttctttgaaaaaaataaaccaaatgaatagaccattagcaaaattaaccaagaaaaaaaggagaagattcaaataagcccaattagaaatgaaatgggagatattacaaccaatatctcagaaacacaaaagatcattcaaggctactaggaacacctttacatacacaaactagaaaacctagaggtgatggataaattcctagaaatatacaaccatcctagattaaactaggaagaaatagaaactctgaacagaccaataataagaagcaagattgaaacagtaactaaaaagttaccaacaaaaaaagtctaggtccagatgaaatcacaggtgaattttatgtgacattcaaagaagaattggtaccaatgatactaaaactattccaaaagatagagaaaaagggaatcctccgtaaatcattctgtgaagccagtatcatcctgataccaaaaccaggaaaggacataacaaaaaagaaaactacagcccaatatccatgatgaacatagatgcaaaaattctcaacacaatactagttaacagaatccaacaacatgtcaaaaagataatacaccatgatcaagttagttttataccagggacgcagggattgtttaacatccacaagtcaataaatgtgatatgcctcataaaaatatttttttaaaaaatcacataatcatctcaataaatgcagtaaaaccctttgacaaagtccagcatccctttatcattaaaaccctcagcaaaatcagcatagaaggggcttaccttaaggtaatgaaagccatctatgacaaacccacagccaacataatactgaacagggaaaagttgaaaacattctccctgagaactggaagaagacaatgatgcccactttcacaacttctattcaacatagtattggaagtcctagccagagcagtcggacaagataaagaaataaagggcatccaaattggtaataaggaagtcaaactgtcactgtttgctgatgacatgattgtatacctagaaaaccctaaagactcatccagaaagctcctagaactggtaaatgaattcagcaaagtttcaggttacaaaattaatgtacacaaatcag

SEQ ID NO: 5001 - DNA, 2041 bp, Homo sapiens
  source 1..2041: mol_type = other DNA
tcatggtggacgtgaggcaggagaagattgcagctacagacagagcagcatgcagaggctcgcattgtgaattttagctccagatggactgcaagaacaaaccagcaatcctgagaggacccacagaccatctgaagaaaactaactgctcctgcaggacccaggagacaccccaagttctgtgagtggcccaactgcagaagtgtgaaagggagagcctcctctcccaaacacacccactggagaagctgaaggtctgtttgcaggagaagtttccaactttacctggagctgaggcaatttagagggccgagtgaaatacaggggtagaggaagcagcagaaagtccctgtgagcttgctgggtcccctagcaggccattcctgcctggtaccacagggatacatttggaggctggccagagaagcagggagtaaaactccacagggaggaggaaatctttagctgaactttgtaacaatttgaacattgtgagaagcctcctggccagaaatcgggggagggcacaaatctggtgtgcagactccacaggtgggggaagaaccaagcccttttcttttgcagcttggaagcaggtatcctggggcaagttttcaagcccgtctcgtcctctacctggaaacagacttggggctgttggggagaagcatagtgggagtgagatcagctctttggtttgcacgggagctgggtgagacctgtgactgctggctttcccccacttccctgacaacctgcatgactcagcagaggcagccataatcctcctaggtacacagctccggtgacccgggaatctcaccccaatctcccacagcagctgcagcaagacccacccaaggaatgtctgagctcagacatgcctagccccacccccacctgatggccctttcctatttaccctggtagcagaagacaaagggcatataatcttgggagttttagggccccacccacggccagtccctctccatactaccatagctgatgctttctggaaagtgccacctcctggcaggaggccacccagaacaaaaatgaagcattaaaccaccaaagctaagaatcctcacagactccattgcaccccctgccacctccactggaagaggcactggtatccatgttgagagacgcatagatggttcacatcccaggactctgtgcagacaccccccagtaccagcctggattcagatagacttgctgggtggctagacccagaatagagacaacaatcactgcagttaagctcacaggaagccacatccataagaaaagggggatagcactacagcaagggaacatcctgtgggacaaaagaaatctgaaaaaacagtcttcagccccagaccttccctctgacagagcctacccaaatgagaaggaaccagaaaaccaaccctgcctagtaatatgacaaaacaaggctcttcaacacccccctaaagaatcacactagttcaccagcagtggatccaaaccaagaagaaattcatgatttatctgaaaaagaattcaggaggttagttattaagctaatcagggagggaccagaaaaaggcgaagcccaatgcaaggaaatccaaaaaatgatacaagaagtgaagggagaaatgttcaaggaaatagacagcttaaagaaaaaaacaatcaaaaatccaggaaactttggacacactttcagaaatgtgaaatgccctggaaagtctcagaatgtaattgagcaagtaaaagaaagaaatgtagagctcaaagacaaggttttttaattaatccaatcttacaaagacaaagaaaaaagaataagaaaatatgaacaaagcctccaagaagtctggcgttatgttaaacaaccaaacctaacaataataggtgttcctgaggaagagaattctaaaagcttagaaaacatatttgggtgaataattgaggaaagcttccctggtcttgctagagacctagacatccaaatacaagaagcacaaaaacacctggaaattttatcacaaaaagatca

SEQ ID NO: 5002 - DNA, 29 bp, Homo sapiens
  source 1..29: mol_type = other DNA
tccttcatttgcaggacatcaagggctcc

SEQ ID NO: 5003 - DNA, 556 bp, Homo sapiens
  source 1..556: mol_type = other DNA
tgaagcagaagttaaaaagggaaaaaacaagttttcctgtgcttggctgactccctccaaggccagcaataggcagggccctggcagagccttgataacactatctgtaaagccagagcccaaaggaatgagctccagagacactctgaacaacaccccctccccggagcgaggataagaaaagaaaataacaaattcctttctcacaactatttctaaaaacaccagtgttttacaagttttgtaagttcctgttttccctgcagtgcagctgcaaggtcacaagctgtgcttgggttgcaagacctgtcacaacttaattaactgcctttgttttgcttctgtaagcccgcttgcctgccacacaggttttgtgctttcaaattcccgctgcaccattcaaactagccaaccccctttcagaagtgtgtataaaagtcaagccctgtctttatctggggctcgcctttggatgttaatctgctgagtcagtggccacctaataaaatcctcctgttccacccattggtctatccagtctcccgattcctgcaac

SEQ ID NO: 5004 - DNA, 11148 bp, Homo sapiens
  source 1..11148: mol_type = other DNA
ttctttgtgatgtgtgcattcaactcacatagttgaaaccatctcttgatcgagtagttttgaacctctcttgttgtagaatctgaaagtggatatttgtgtcccctggcggtctatggtggaaaagaaatatcttcacaaaaatactacacagaagcattctgagaaacttctttgtgatgtgtccattcatctcacagagttgaacctttcttttgattgagcagttttgaaatactccttttgtagaatctgcaagtggatattttgagtgctttgagaactattgtggaaaaggaattatcttctcataaaacctacactgaaggattctgagaaatttcttgtgatgtgtgcattcatctcacagagttgaacatttcctatgattgagcagtttggaaatattcttttcatagaatctggaagtggatatttggagccctttgaggcctattgtggaaaaggaaatatcttcacataaaaactacagagaagcattctgagaaacttctttgtgatgtgtgcattcatcaaacagaattgaacatttctttttttgtgcagttttgaaacaatcttcttgtagtatctgcaagtggatatttggagcgttttaagacctaaggtgggaaaggaaatatcttcacataaaaattacacagagagattctgagaaacttctttgtgatgtgtgcattcatctcatatatttgaacctttcttttcattgtgcagtttccaagcaatctttttctagaatatgtaagtggatatttggagcactttgtggactatggagggaaaagaaatgtcttcacataaaaactacacagaagcattgggagaaaattcttgtgatatttgtgttcaacccacaaagttgaacatattgtttgatagagcagttgtgaaactctctttttgtagaatctgcaagtgggtatttggagccctttgtggcccatggtagaaaaggaactatcttcacagaaaaactacccagaagcattttgagaaactcctttgtgatttgtgcactcatctcacggtgttgaaactttatttttattgagcaattttgaacattcctttttatagaatctacaagtggatatttggagtggtttgagacctatggtagaaaaagaactatcttcaccgaaaaaccacacagaagcattttgagaagcttctttttgatgtatgcattcaactcacagagacgaactgatcttttgatagagcagttttgaaactcacttttgtagaatctgcaggtggatatttggagtacattgcggcctatggtgaaaaaggaactatcttcgcatgagaaccaggcagaaacattctgagaaactagtttgtgatgtgtgcattcatctcacagagttgaaatcattttttgatttgagtagtttggaaacactctttttgtggaatctctaagggcatatttgaagcgttttgcacgctgttgtggaaaaggaaatatcttcacataaaaactacacagaagcattctgagaaactactttgtgatgtgggcattcatgtcacggttttgaaccttccatttgattgagcagttttgaaatactcgtttggtagaatgtacaagtgaatatttggagcactttgaggcctatgatagaaacggaaatatgtttacataaaaactacacagaagcatgctgagaaaccgctttgtgatgtgtgtattcacctccgggagttcaacctatcatttgacagagcggttttgaaactctttttgtagaatctccaagtggatatttggagccctttgcattctactgtgaaaaggaaatatcttcacatcaaaactacacagacgcattctgagaaacttctttgtgatgtttgctttcaactcacagaattgaaccttttgtttgagtagttttgaaactctctttttgtagaatctagaagtggatatttagaacgcttggaggcctatggtgcaaaaacgaataacttcacacaaaaaatacacagaagcattctgagaaacttctttacgatgtctgcattcacctcacagatttgaatgtctcttttgattgagcagtttggaagcactctttcggtagaatctgcaagtggatatggagagagctttgaggcctgttgtggaaaactaaatgtcttcatataaaagctacacagaagcattctgagaaactcctttgttatgtgtgcattcatctcacagagttgaacctttcttttgattcggcagttttgaaacacggtttctgtagaatcttcaagtggatatttggagcacttttctgcctattgtgtaaaaggaaatatctttacgtaagaactacacagaagcattctgagaaacttctttgtgatgttcttaactcacagcgttaaacttacctttggtagagcagttttgaaactctctttttgtggaaaatgtaagtgggtatttagagccatttgtggcctatggtggaaaggaaaatatcttcacataaaaactacacagaagcattctgagaaactaccttttgatgtgtgtatttgtctcagactggaaccttccttttgattgagcagttctgaaacactctttttgtagaatctggaagtgcatatttggagtgctttgaggcctatggtggaaaaagaaatatcttcatttaaaaactacacagaagcattctgagaaacttctttgtgatgtgtgtgtgtattcataccacagagtcgaaactatcgtttgagagagcatttcgaaactttctttttgtaggatctgcaagtggatatttggagggctttcaggcctatggtggaaaaggaaatatcttcacataaacactactcagaagtattctgagaaactttttttgtggaatctggcaattggatatttggaacgctttgaggcctattgtggaaaaggcaatatcttcacataaaaactacacagaaacattccgagaaacttctctgtgatgtgtgcactcatctcacggagttgaacctttctttgattgacaagttttgaaagactatgtttctataatgtgcaagtggatatttggagtgctttgaggcatatggtggaaaaggaaatatattcacataaaactatacagaagcgttcccagaaacttatttgtgatgtgcttattcaactcgcagagttgaccctatcttttgatacagcagttttgaaactctctttttgtagaatctgcaagtggatatttgcagcgctttgaggcctgcggtggaaaaggaaatatcttcacataaaaactacacagaagcattctcagtaacttctttgtaatgtgtgcattcacctcacagacttgaaacttcctcttgattgagcagcttggaaacacacttttagtgaaatctgcaagtggatatttggagcaccttgaggcctgttgtggaaaaggaaatatcttcacataaaaactacacagaagcattccaataaacttgtttgtgatatgtaccttcaactgacagatttgaacctttcttttgattaaatagttttgaaaatctctttttgtagaatctgcaagtggatatttggagtgctttgaggcctatggtggaaaaggaaatatctttacataaaaactacacagaagcattctgagaaactactttgtgatgtgtgcattcatatcacatagttgaacctatcttttgatagagcacttttgaaactctctttttgtagaatctgcaagtggatatttggagccctttgcagcctatggtggaaaaggaaacatcttcacataaaaactacacagaagcattctcagaaactactttgtgatgtgtgcgttcagctcacagacttgaaacttcctcttgattgagcagtttggaaacactctttagtaaaatctgcaagtggatattcggagcactttgaggcctgttgtggagaaggaaatatcttcacataaaaactacacagacgcattccgagaaacttgtttgtgatatgtgcattcaactgacagagttgaacctttcttttgattgactagttttgaaaatctctttttgtagaatctgcaagtggatatttggagtgctttgaggcctatggtggaaaaggaaatatcttcatatgaaaactacacagaagcattctgagaaaattctttgtgatgtgtgcattcaaaccacagacttgaactgatcttttgatagagcagtttttaaagtgtctttctgtagaatctgcaagtggttacttggagacctttgtggaagatggtggaaaaggaaatgtcttcccgtaaaaactacacagatgcattctgagaaacttctttgtgatgtgtgcattcatctcacagagttcaacctatcttttcgtagagcagttttgaaactctcttttcctagaatctgtaagttgatatttggagccctttgcggcctattgtggaaaaggaaataacttcacatgaaaactacacagaagctgagaaacttctttgtgatgtgtgcattaatttcccagagtcgaacctttcttttgattgagcagttttgaaacactctttttgtagaatctgcaagtggacatttgaagcactttgaggcctattgttgaaaaggaaacatcttcatataaaaacaacaaggaagcattctgagaaaccattttgtgctgtgtgcattcacctcacagagttcaactttatttgatacagcagttttgaaacactcttcttgtggaatctgcaagtggaaattgggaaatatttaggcatatggtggaaaaggaaacatccgcacataaaaactacacagacacattctgtgaaacttctttgtgctgtgtgcattcaaaccacagagttgaacctatcttttgaatgagcagttttgaaactctcttttcatagtatctgcaagtggatatttggagccttttgtggcctacggtgggaaaggaaatatcttcatataaaaactacacagaagcattctgagaaacttctcagtgatgtgagcattcttctcacagagttgaactatcttttgattgagcagttttgaaacactgttttttttagaatctgcaagtgaatatttggagccttttgggtcttattgtggaaaaggaaatatcttcacataaaaactacacagaagcattctgagaaacttctttgtcatgtgtggattcatctcacagagttaaatctttcttttgattgagcagtttgcaaacactctttttgtggtatctccaggaggatatttggagtgctttgaggcctatgttggaaaaggaagtatcttcccttaaaagctatgcagaagcattctgagaaacttccttctgatgtgtgcattcatctcacctagttgaacctttcttttggttgtgcacttttgaaacactctttttgtggaatctgcaagtggatatctggatcactttgacgtctattgtggaaaaggaaatatcttcacataaaaactacacagaagaattccgacatagttctttgtgatgtgtgcattcaactcacatagttgaaaccatctcttgatcgagtagttttgaacctctcttgttgtagaatctgaaagtggatatttgtgtcccctggcggtctatggtggaaaagaaatatcttcacaaaaatactacacagaagcattctgagaaacttctttgtgatgtgtccattcatctcacagagttgaacctttcttttgattgagcagttttgaaatactccttttgtagaatctgcaagtggatattttgagtgctttgagaactattgtggaaaaggaattatcttctcataaaacctacactgaaggattctgagaaatttcttgtgatgtgtgcattcatctcacagagttgaacatttcctatgattgagcagtttggaaatattcttttcatagaatctggaagtggatatttggagccctttgaggcctattgtggaaaaggaaatatcttcacataaaaactacagagaagcattctgagaaacttctttgtgatgtgtgcattcatcaaacagaattgaacatttctttttttgtgcagttttgaaacaatcttcttgtagtatctgcaagtggatatttggagcgttttaagacctaaggtgggaaaggaaatatcttcacataaaaattacacagagagattctgagaaacttctttgtgatgtgtgcattcatctcatatatttgaacctttcttttcattgtgcagtttccaagcaatctttttctagaatatgtaagtggatatttggagcactttgtggactatggagggaaaagaaatgtcttcacataaaaactacacagaagcattgggagaaaattcttgtgatatttgtgttcaacccacaaagttgaacatattgtttgatagagcagttgtgaaactctctttttgtagaatctgcaagtgggtatttggagccctttgtggcccatggtagaaaaggaactatcttcacagaaaaactacccagaagcattttgagaaactcctttgtgatttgtgcactcatctcacggtgttgaaactttatttttattgagcaattttgaacattcctttttatagaatctacaagtggatatttggagtggtttgagacctatggtagaaaaagaactatcttcaccgaaaaaccacacagaagcattttgagaagcttctttttgatgtatgcattcaactcacagagacgaactgatcttttgatagagcagttttgaaactcacttttgtagaatctgcaggtggatatttggagtacattgcggcctatggtgaaaaaggaactatcttcgcatgagaaccaggcagaaacattctgagaaactagtttgtgatgtgtgcattcatctcacagagttgaaatcattttttgatttgagtagtttggaaacactctttttgtggaatctctaagggcatatttgaagcgttttgcacgctgttgtggaaaaggaaatatcttcacataaaaactacacagaagcattctgagaaactactttgtgatgtgggcattcatgtcacggttttgaaccttccatttgattgagcagttttgaaatactcgtttggtagaatgtacaagtgaatatttggagcactttgaggcctatgatagaaacggaaatatgtttacataaaaactacacagaagcatgctgagaaacctctttgtgatgtgtgtattcacctccgggagttcaacctatcatttgacagagcggttttgaaactctttttgtagaatctccaagtggatatttggagccctttgcattctactgtgaaaaggaaatatcttcacatcaaaactacacagacgcattctgagaaacttctttgtgatgtttgctttcaactcacagaattgaaccttttgtttgagtagttttgaaactctctttttgtagaatctagaagtggatatttagaacgcttggaggcctatggtgcaaaaacgaataacttcacacaaaaaatacacagaagcattctgagaaacttctttacgatgtctgcattcacctcacagatttgaatgtctcttttgattgagcagtttggaagcactctttcggtagaatctgcaagtggatatggagagagctttgaggcctgttgtggaaaactaaatgtcttcatataaaagctacacagaagcattctgagaaactcctttgttatgtgtgcattcatctcacagagttgaacctttcttttgattcggcagttttgaaacacggtttttgtagaatcttcaagtggatatttggagcacttttctgcctattgtgtaaaaggaaatatctttacgtaagaactacacagaagcattctgagaaacttctttgtgatgttcttaactcacagcgttaaacttacctttggtagagcagttttgaaactctctttttgtggaaaatgtaagtgggtatttagagccatttgtggcctatggtggaaaggaaaatatcttcacataaaaactacacagaagcattctgagaaactaccttttgatgtgtgtatttgtctcagactggaaccttccttttgattgagcagttctgaaacactctttttgtagaatctggaagtgcatatttggagtgctttgaggcctatggtggaaaaagaaatatcttcatttaaaaactacacagaagcattctgagaaacttctttgtgatgtgtgtgtgtattcataccacagagtcgaaactatcgtttgagagagcatttcgaaactttctttttgtaggatctgcaagtggatatttggagggctttcaggcctatggtggaaaaggaaatatcttcacataaacactactcagaagcattctgagaaacttcttcacgatggttgcactaaactctcagagttgaacttatcttttgatagagcagttttgaaactctgtgttactagaatctgcatgtggttatttggagtcctttgtggccgatggtggaaaaggaaatatcttcccctaaaaagtacacagaagcattctgagaaacttttttgacatgtgtgcactaatctcacagagtttaatctatcatttgattgagcagttttaaaaaactttttttgtggaatctgcaattggatatttggaacgctttgaggcctattgtggaaaaggcaatatcttcacataaaaactacacagaaacattccgagaaacttctctgtgatgtgtgcactcatctcacggagttgaacctttctttgattgacaagttttgaaagactatgtttctataatgtgcaagtggatatttggagtgctttgaggcatatggtggaaaaggaaatatattcacataaaactatacagaagcgttcccagaaacttatttgtgatgtgtttattcaactcgcagagttgaccctatcttttgatacagcagttttgaaactctctttttgtagaatctgcaagtggatatttgcagcgctttgaggcctgcggtggaaaaggaaatatcttcacataaaaactacacagaagcattctcagtaacttctttgtaatgtgtgcattcacctcacagacttgaaacttcctcttgattgagcagcttggaaacacacttttagtgaaatctgcaagtggatatttggagcacctggaggcctgttgtggaaaaggaaatatcttcacataaaaactacacagaagcattccaataaacttgtttgtgatatgtaccttcaactgacagatttgaacctttcttttgattaaatagttttgaaaatctctttttgtagaatctgcaagtggatatttggagtgctttgaggcctatggtggaaaaggaaatatctttacataaaaactacacagaagcattctgagaaactactttgtgatgtgtgcattcatatcacatagttgaacctatcttttgatagagcacttttgaaactctctttttgtagaatctgcaagtggatatttggagccctttgcagcctatggtggaaaaggaaacatcttcacataaaaactacacagaagcattctcagaaactactttgtgatgtgtgcgttcagctcacagacttgaaacttcctcttgattgagcagtttggaaacactctttagtaaaatctgcaagtggatattcggagcactttgaggcctgttgtggagaaggaaatatcttcacataaaaactacacagacgcattccgagaaacttgtttgtgatatgtgcattcaactgacagagttgaacctttcttttgattgactagttttgaaaatctctttttgtagaatctgcaagtggatatttggagtgctttgaggcctacggtggaaaaggaaatatcttcatatgaaaactacacagaagcattctgagaaaattctttgtgatgtgtgcattcatatcacatatttgaacctatcttttgatagagcatttcgaaactctctttttgtagaatctgcaagtggatatttggagccctttgtagtctatggtggaaaaggaaatatcctcacataaaaaccacacagaagcattcccagaaactttttgtgatgtgtgcattcatctcacagtgttgaaacattcttttaactgagcatttttgaaaaattctgtttttataatttgcaagtgaatatttggagcactttgaagcctatggtggataaggaaatatttcacataaaaactacacagaagcattctcagaaactcctttgtgatgtgtgcattcatctcacagagttgaacttttcttttgcttgagcagttttgaaagactctttttgtagtttctgcaagtggatatttggagtgctttgtggcctaaagtggaaaaggaaatatcttcacatgaaaactacacagaagcattctgagaaacttgtctgtgatgtgtgcattcaactcgcagagctgaacctatcttttgacagagcagttttgaaactctccttgtgtagaatctgcatgtggttatttggaggcctttgtgaccgatggtggaaaggaaaacgccttccccaaaaaactacacaaaagcattctgagaaacttctttgtcaggtgtgtattcatttcttagagttgaagcttccatttgattgagcagttttgaaacactctttttgtagaatccacaattggatatttggagggcttcgagacctattgtggaaaaggaagtatcttcacttaaaaactacacagaagcatttgcagaaactcctttgttttgtgtgcattcatctcacagagttgagcctttcttttgattgagcagttttgaaaatctctttttgtagaatctgcaagtggatatttggagccctttgcagcctatggtggaaaagaaaatatcttaacataaaaaatacacagaagcattctgagaaacttctttgtgatgtgtgcattcaactcatgcagctgaacctctttttttgacagagcagttttgaaactctcattttgtagaatctgcaagtgtatatttggatatctttgagacatatagtggaaaaggaaatatcttcccataaa

SEQ ID NO: 5005 - DNA, 4377 bp, Homo sapiens
  source 1..4377: mol_type = other DNA
cactcacataggattccagaacactgctacaaggctctgagtgtttgtccctcacataggattccagaacactgctgccattgtctgaatgtttgtcccccacataggattccagaagcctgctgctggagtctgaatgtttgtcccccatctaggattccagaacactgctgcgagggtcagaatgtctgtccctcacacatgattctagaacattgatgctagggtctgtatgtttgcccctaacatatgatttcaaaacactgctcctggattctgaatgttgtccttcacataggaatacagaacactgctgctggagtctggaagtttgtcactcacatagaattccagaacactgctgtgaagatctgaatgtttgaccctcacatgggattccagaacactgctgtgagggtctaaatgtctgtccctcacataggtttccctaacaatgttacgaggttctgaatgtttgtccctaacataggattccagaacactcctgctgtgctctgaatgcttctccctcacataggattccagaacactgctacgagggtctgaatgcttatccctcacataggattccagaacactcctgctgtggtccgaatgtttgttcctcacataggattccagaatactcctgccgtggtctgaatgtttgtccctcacataggattccagaacattcatgctggggtctcaatgtttcccttaacataggatttcagaacactgctcttggggtctgaatgtttgtcactcacataggattacagaacactgctgctgtggtctgaatgtttgtccctcacatagaattctggaacactgctacaagggtctgaatgtttgtccttcacataccattccagaacactgttgccgtggtctgaatgtgtgtccctcacataggattccagaacactgctactaggttctgaatgtttttcccacacctaggattccagaacacttctactggtgtctgaatggttgttcctcacatatgattccaggacactgctacgagagtcttaatgtttgtccttcacataggattctagaacactgctcccatggtctgaatgtttgtccttcacatagcattccagaacactgctgctggggtctgaatgtctgcccctcaaatcagattccagaacactgctgctgggttttgaatgtctttccctcacatagagttccagaacatggctgggagggtctgaatgtttgtccctcacatgggataccagaacactgctgcgagggtctaaatgtctctccctcacataagatttcacgacactgctacgaggttctgaatgtttgtacctcacataggattccagagcactcctgctgtggtctgaatatttgtccctcacataggattccagaacactgccacgtgggtctgaatgtttgccctcacataggattccagaacactattgctgtggtctgaaagtttgtccctcacataggattccagaacactcctgctgtggtctgaaagtttgttcatcacataggactccagaacactgctaagagggtctgaatgtccctcacattgtattccagaacactccttctgtggtctgaatgtttgttcctcacataggattcgagaacactcctgctgtggtctgaatgtttgtcccttacctaggattcgagaacattcacactgggatataaatgcttgcccttaacataggatttcagaacactgctcctggggtctgaaagtttgtccctcacataggattccagaactctcctgctgtggtctgaaagtttgtaccgcacataggattccagaacactgctgctgtggttggaaagtttttctgtcacataggattccagaacactgcagctgggttctgaatgtttgtccctcacataggatttcagaacactgctacgagtgtctgattgttggtccctcacataggattcctgaacactgctgctgggctctgaatgtttgtctctcacattggattgcagaacactactgctatggtctgaacgtttgtccatcacataggattccagaacgctcctgctgtggtctgaatgtttgtctgtcacataggattccagaacactgccgctggggtctgaatgtccctgacataggattccagaacattgttatgagagtctgaatggttgtctttcacatagcattccagaacactgctacgaggatctgaatgttggtccctcacacaggattccagaaccctcctgctggggtctgaatgtttgtccctcacaaaggattccagaacactgctatgagggtctgaatatttgtccctcacataggattccagaacactcctgctgtggtctgaatggttgtccctcacaaaggattccagaacactcctgctgtgatctgaatggttgtccctcacataagattctggaacacttctgccgtggtacgaatgtttgtgtcttacgtaggattccagaacactgttacgagggtctcaatgtttgtccctcacataagattccagaacactgctgctggggtcttgaatgcttgtccctcacatacgattacagaacactgttgctggggtgtgaatgtttgtccctcacatgggattccagaccacagctgctggggtctcattgtctgtccctcaaaaaaggattccagaacactgttatgagggtctgaatttttgttcctcacttaagactgcagaacactgcttcgagggtctaaatgtctgtccttcacataggattccagaacactgctacgagggtctgaatgtttgtccttcacatagcatttcagaactgccatggtctgaatggttgtccctcacatagtattccagaacactgctatgagggtctgaatgtttgtacctcacataagattccagaacactgctatgagtgtctgaaagtttgtccctcacataggattccagaagactgctgctggggtctgaatgtctgtccttcacatcagattccagaacactgctgctggggtttgaatgtctgtccctcacatagaattccagaagactgctgggagggtctgaatgtttgtccctcacataggattccagaacactgctacgagggtctgaatgtttgtcctttacataggattccagaacactccttctggggtctgaatgtttgtccctcacataggattccagaacactgctacgagggtctgaatgttttttaatcacataggattccagaacacttctacaagggtctgaatgtttgtccctcacataggattccagaatactcctgctatggtcttaatgcttgtccctcacataggattccagaacattcatgttggggtctgaatgtttgcccttatcataggatttcagaacagtgctcctggggtctgaatgtttgtccttcatataggatttaagaacactcctgctttggtctgaaagtttgtccctcacataggattccagaactctactgctgtggtctgaaagtttgtccttcacgtgggattccagaacactgctgttgtggtttgaatgtttgtccctcacataagattccagaacactgctacgagggtctgaatgtttgtccttcacataggattcctgagcattgttgctgtggtctgaatgtttgtcactaacataggattccagaacagtgctacgagggtctgaatgtttgtccctcacataggattccagaacacttctgctggtgtctgaatgtttatacctcacataggactcgagaacactgctgttagggtctgaacgtctgtccctcacataggattctagaacactgctgcgagtgtctgaatgtttgtctcgcagatgggattctagaacactgctgcgagggtctaaatgtctgtctctgacataacattccagcacactgctacaaggttttgaaatgtttgtccctcacataggattacagagcactcctgctgtggtctgaatgtttgtccctcacataggattccagaacactcctgctgtggtctgaatgtttgcccctcacataggattccagaacattcctgctgtggtctgattgttcctcacataggattccagaacactgctacgaggttctgaatttttgcccctcacataggattgcagaacactgctacaagggtttgaaagttttcccctcacataggattccacaacactactgctggggtctgaatgtttgtcccctcacataggattcctgagcactcctgctgtggtctgaatgtttttccctcacataggattcctgaagactgctgctgtcactatagtcgttgggagtgtctgaatgtttgaccttcac

SEQ ID NO: 5006 - DNA, 299 bp, Homo sapiens
  source 1..299: mol_type = other DNA
gctgggcgcgggggctcaagcctgtaatcccagcactttgggaggccgaggcaggtggatcacctgaggtcaggagttcgaaaccagcctgggcaacatggtgaaaccctgtctctactaaaattacaaaaattagccgggcatggtggcaggtgcctgtaatcccagctacttgggaggctgaggcaggagaatcgcttgagcccgggaggcaaatggtacactgatctgagatcacaccactgcactccagcctgggcgacaaagtgagactgtctaaaaaataataataataaaaa

SEQ ID NO: 5007 - DNA, 260 bp, Homo sapiens; identical to SEQ ID NO: 4922
  source 1..260: mol_type = other DNA

SEQ ID NO: 5008 - DNA, 288 bp, Homo sapiens; identical to SEQ ID NO: 4923
  source 1..288: mol_type = other DNA

SEQ ID NO: 5009 - DNA, 652 bp, Homo sapiens
  source 1..652: mol_type = other DNA
aaatcaaatataaaattttaagtttcccctcaaacctgcccaccacagggatctgaatggacccctccttttggccaagggccttttaaaattggttcaggtcctgagaggaaagaaggatagacatgcttcattatacactccacctttttgaaatttagggaaagttgaccatcattaacatcaacacagaccttaagtttgacaagaaatatttaccacctattctcttttaagtctgccacatggagtcttcctcatcttgataaactttgtctctatgctccctattatttattgcaacccagtcattcctatccattgtttctatgtctacagaaaataactctttcaaccaactgccaatcagaacgtatttaaatatacctataacttgaaagcccagccccgcaccaccactcacttcaagttgtcccacctttctggaccaaacaaatgtacatcttacatgtatttgattgatatctcgtgtctccctaaaatgcagaaaactaggctgttcccagaccatcttgggcacatgttctgaggatcttctgagaagggttgtgttatgggtcattggtcacccatatttggctcagaaaaaatctctttaaatattttgcagagtttgactcctttcatgaac

SEQ ID NO: 5010 - DNA, 967 bp, Homo sapiens
  source 1..967: mol_type = other DNA
tgtggggaaaagcaagagagatcagattgttactgtgtctgtgtagaaagaagtagacataggagactccattttgttatgtactaagaaaaattcttctgccttgagattctgttaatctatgaccttacccccaaccccatgctctctgaaacatgtgctgtgtcaactcagagttgaatggattaagggcggtgcaggatgtgctttgttaaacagatgcttgaaggcagcatgctccttaagagtcatcaccactccctaatctcaagtacccagggacacaaaaactgcggaaggccgcagggacctctgcctaggaaagccaggtattgtccaaggtttctccccatgtgatagtctgaaatatggcctcgtgggaagggaaagacctgaccgtcccccagcccgacacccgtaaagggtctgtgctgaggaggattagtaaaagaggaaggaatgcctcttgcagttgagacaagaggaaggcatctgtctcctgcctgtccctgggcaatggaatgtctcggtataaaacccgattgtatgctccatctactgagatagggaaaaaccgccttagggctggaggtgggacctgcgggcagcaatactgctttgtaaagcactgagatgtttatgtgtatgcatatctaaaagcacagcacttaatcctttacattgtctatgatgccaagacctttgttcacgtgtttgtctgctgaccctctccccacaattgtcttgtgaccctgacacatccccctctttgagaaacacccacagatgatcaataaatactaagggaactcagaggctggcgggatcctccatatgctgaacgctggttccccgggtccccttatttctttctctatactttgtctctgtgtctttttcttttccaaatctctcgtcccaccttacgagaaacacccacaggtgtgtaggggcaacccacccctac

SEQ ID NO: 5011 - DNA, 967 bp, Homo sapiens
  source 1..967: mol_type = other DNA
gtggggaaaagcaagagagatcagattgttactgtgtctgtgtagaaagaagtagacataggagactccattttgttatgtactaagaaaaattcttctgccttgagattctgttaatctatgaccttacccccaaccccatgctctctgaaacatgtgctgtgtcaactcagagttgaatggattaagggcggtgcaggatgtgctttgttaaacagatgcttgaaggcagcatgctccttaagagtcatcaccactccctaatctcaagtacccagggacacaaaaactgcggaaggccgcagggacctctgcctaggaaagccaggtattgtccaaggtttctccccatgtgatagtctgaaatatggcctcgtgggaagggaaagacctgaccgtcccccagcccgacacccgtaaagggtctgtgctgaggaggattagtaaaagaggaaggaatgcctcttgcagttgagacaagaggaaggcatctgtctcctgcctgtccctgggcaatggaatgtctcggtataaaacccgattgtatgctccatctactgagatagggaaaaaccgccttagggctggaggtgggacctgcgggcagcaatactgctttgtaaagcactgagatgtttatgtgtatgcatatctaaaagcacagcacttaatcctttacattgtctatgatgccaagacctttgttcacgtgtttgtctgctgaccctctccccacaattgtcttgtgaccctgacacatccccctctttgagaaacacccacagatgatcaataaatactaagggaactcagaggctggcgggatcctccatatgctgaacgctggttccccgggtccccttatttctttctctatactttgtctctgtgtctttttcttttccaaatctctcgtcccaccttacgagaaacacccacaggtgtgtagaggcaacccacccctaca

SEQ ID NO: 5012 - DNA, 557 bp, Homo sapiens
  source 1..557: mol_type = other DNA
tgaagcagaagttaaaaagggaaaaaacaagttttcctgtgcttggctgactcactccaaggccagcaataggcagggccctggcagagcctagataacactatctgtaaagccagagcccaaaggaatgaggtccagagacactctgaacaagaccccctccccggagcgaggataagaaaagaaaataacaaattcctttctcataactatttctaaaaacaccagtgttttacaagttttgtaagttcctgttttccctgcagtgcagctgcaaggtcacaagctgtgcttgggttgcgagacctgtcacaacttaattaactgcctttgttttgcttctgtaagcccgcttgcctgccacacaggttttgtgccatcaaattcctgctgcaccattcaaactagccaaccccctttcagaagtgtgtataaaagtcaagccctgtctttatctggggctcagcctttggatgttaatctgctgagtcagtggccacctaataaaatcctcctgttccacccattggtctatccagtctcccgattcctgcaac

SEQ ID NO: 5013 - DNA, 84 bp, Homo sapiens
  source 1..84: mol_type = other DNA
ggatttggcttaataatgcttgatttgaaaacaaaatctgagaatgggttggaatttacaagctcaggctcagccaacactgag

SEQ ID NO: 5014 - DNA, 966 bp, Homo sapiens
  source 1..966: mol_type = other DNA
gtggggaaaagcaagagagatcagattgttactgtgtctgtgtagaaagaagtagacataggagactccattttgttctgtactaagaaaaattcttctgccttgagattctgttaatctataaccttacccccaaccccgtgctctctgaaacatgtgctgtgtcaactcagagttaaatggattaagggcggtgcaagatgtgctttgttaaacagatgcttgaaggcagcatgctccttaagagtcatcaccactccctaatctcaagtacccaggacacaaaaactgcggaaggctgcagggacctctgcctaggaaagccaggtattgtccaaggtttctccccatgtgatagtctgaaatatggcctcgtgggaagggaaagacctgaccatcccccagcccgacacccgtaaagggtctgtgctgaggaggattagtataagaggaaggcatgcctcttgcagttgagacaagaggaaggcatctgtctcctgcccgtccctgggcaatggaatgtctcagtataaaacccgattgtatgttccatctactcagatagggaaaaactgccttagggctggaggtgggacctgcgggcagcaatactgctttgtaaagcattaagatgtttatgtgtatgcatatctaaaagcacagcacttaatcctttaccttgtctatgatgcaaagacctttgttcacgtgtttgtctgctgaccctctccccacaattgtcttgtgaccctgacatatccccctctttgagaaacacccacgaatgatgaataaatactaagggaactcaaaggctggggggatcctccatatgctgaatgctggttccccaggtccccttatttctttctctatactttgtctctgtgtctttttcttttccaagtctctcgttccaccttacgagaaacacccacaggtgtggaggggcaacccacccctaca

SEQ ID NO: 5015 - DNA, 224 bp, Homo sapiens
  source 1..224: mol_type = other DNA
aggactgggaccaaacctcttaattactctaagataaacataatagattaaaacttgatgagaatccctcaatctttatggaaaggctgagagagggtgagtaaaacacacctctgtattttctgactcaattgagcaccagttaatcttaagaaagaggtttatttttcaggcagtcctgattaaaaaaaaaaaaagctacaaagcaggtcacatgttcggat

SEQ ID NO: 5016 - DNA, 652 bp, Homo sapiens
  source 1..652: mol_type = other DNA
aatcaaatataaaattttaagtttcccctcaaacgtgcccaccacaggcatctgaatggacccctccttttggccaagggccttttaaaattggttcaggtcctgagaggaaagaaggatagacatgcttcattatacactccacctttttgaaatttagggaaagttgaccatcattaacatcaacacagaccttaagtttgacaagaaatatttaccacctattctcttttaagtctgccacatggagtcttcctcatcttgataaactttgtctctatgctccctattatttactgcaacccagtcattcctatccattgtttctatgtctacagaaaataactctttcaacaaactgccaatcagaatgtatttaaatatacctataacttgaaagcccagccccgcaccaccactcacttcaagttgtcccacctttctggaccaaacaaatgtacatcttacatgtatttgattgatatctcgtgtctccctaaaatgcagaaaactaggctgttcccagtccatcttgggcacatgttctgaggatcttctgagaagggttgtgttatgggccattggtcacccatatttggctcagaaaaaatctctttaaatattttgcagagtttgactcctttcatgaaca

SEQ ID NO: 5017 - DNA, 843 bp, Homo sapiens
  source 1..843: mol_type = other DNA
tcaaaaagtgggcgaaggacatgaacagacacttctcaaaagaagacatttatgcagccaaaaaacacatgaagaaatgctcatcatcactggccatcagagaaatgcaaatcaaaaccactatgagatatcatctcacaccagttagaatggcaatcattaaaaagtcaggaaacaacaggtgctggagaggatgtggagaaataggaacactttgacactgttggtgggactgtaaactaattcaaccattgtggaagtcagtgtggcgattcctcagggatctagaactagaaataccatttgacccagccatcccattactgggtatatatacccaaaggactataaatcatgctgctataaagacacatgcacacgtatgtttattgcagcactattcacaatagcaaagacttggaaccaacccaaatgtccaacaatgatagactggattaagaaaatgtggcacatatactccatggaatactatgcagccataaaaaatgatgagttcatatcctttgtagggacatggatgaaattggaaaccatcattctcagtaaactatcgcaagaacaaaaaaccaaacaccgcatattctcactcataggtgggaattgaacaatgagatcacatggacacaggaaggggaatatcacactctggggactgtggtggggtcgggggaggggggagggatagcattgggagatatacctaatgctagatgacacattagtgggtgcagcgcaccagcatggcacatgtatacatatgtaactaacctgcacaatgtgcacatgtaccctaatacttagagtataataaaaaaaaaaaaa

SEQ ID NO: 5018 - DNA, 309 bp, Homo sapiens
  source 1..309: mol_type = other DNA
ttctccttttatccattatacagctacccttctctaaactaaaatttcacccctgggtcccactttcatgatttagcatcactgaaaaccaaaactgcccaattgtccccaaaccttgtaagctgaaagtggatgactacatatgaacaatttaaaaaatcatcttcatgcctttaatacctgatgccaacactgaagtcattaaaaactggaaaccaaagaattcattaaatcatcactgccatcctcactctaccatctaaaaaatactttatgatcaacatgtggtagtgtcaattggctgccctc

SEQ ID NO: 5019 - DNA, 6736 bp, Homo sapiens
  source 1..6736: mol_type = other DNA
agatgaagaaaggcaccatgcggtcaagttagtgagtaatcactaagtcattggtctgcactcgaggtcaccacgttctggcggaagttcattcaagctgagttttcattatgggacaacagttatcagcaccacagaaacagtatataaaactattgaagcagctgcttaggtctaggagagtttcagtttcacaggttcaattaaggaaattataaactgtggtcacatataatccgtgacttccagaagaaggaaccctacacgtagaactgtggcaacaagtagggagaaatcttaaacaatattatgcacaggggcatcaggtcccagcatcagctttaacacgatgggctttactaaggatggctttagtcccattatacacagaagagcctaaaaaggagaaggagggagaaaggtgacctgccttatcacctccttttccctcagtcccactatcaccgggataaaataacaaaaagtaaatggagggtttgcctgaccccctcttactataagtagaaaaaaagacaagaaacgtacttcagctatgggaccttgtcttaaacaagcagcattagaaggagagttcttagcctgtccagtaatgcaagaccgacatggtaatcaagtatatgaacccgtttcctttcacacttacaaataactaagaaaaagcattaaagaaaacgctcccactagaccatttacaaaaggaatgattgaggccttagcagaccacttctgtatggcccaatggaactggtcaattctggctaaagcaactctggagcctagcccatacctcctctggaaggcagaatatgatgagctgtgtgaacaagaagccaaccagaatcaggcggcggggcaaaatataactgctgataagctccaagggaaaagtcctcatgctgatgtacaacaacaactaaattttgatccccaggcctatgatcaagtgtctttgtgtgctctcagagcttgggactgaattcccaagagctgactgagttcagcaggtgtctttcgtaaatatttgacaagggcctcaggagcaatttgttgagtttatggatcacttaattcaggcaattaagaggcaaatcagtcacacccagtccactcctatcttattgttgcagttggctttcaaaaacattaatgtggattgccagcaggcaatgcaggcaatcaaaggaaaggcaggcaccgtcagggagctgatataagcatgtcacctggtaggaactgagacaaacgaggccagaatattagctatggcattaaggcctcctaaagtgagaagggagagaaagcaaaatcattttctatgtggagtgaaaggtcatgtgaagaggaaatgcccccatagtaaaaagcaagctaactcagggaaaggacccttttctatatgtcctggatgtaggaaagggagacgttaggaaaatcaatgcaggtctaaatttgataaaaatagccatctcataggaaatcagttgggaaacttcatgaggggacggccccaggccccactcccaactggggcaatgccaacagctttcctcggttggctagaaagcccacagtcctctctctcagagcagtcactactgggagtgcatgactggacttactctgctctgccaaattagtgctacaagaggaagaaggccctgcaagggttgagactgggatctgtggcccgctgcctccaggaacagcaggattatgcctggggcagtctagcctatctgtaaaggaattaatgtgctccttggggtagttgatagtgatgaccaaggtgagatattggttatgatggaatgtaaaggtctgcatgttcttccccctggatcaaaaaatagcttagttaaagattttaccatgctgggtccctaatgcccatgagaaggaaaggggaaagtgaagttttggaagcacaggagcatattggaatcaattaatcactgatcagagatgcatgattaccttaaaaattggtaataagaattttactggcttattgggcacaggggtggacatttcaatcattagtgatcagaactggtcaaaaatctgtccttgggtcactcagaaacagaaaactgtcagcaacaggaaagcatacacagccaaacagagcacatgcccctgaacctgctgtgattcagaaggaaaaaaggcattatacaacctctgattgtgcccatccctgctaatctttcaggatgggacctattagcccaatggtggggcgggggggcactctgcagacccctttctaacaatggccactcttgttattcctccactacctctgacttggatgtctcaacacctggtctgggtagcacagtggcctctgaagggagagaaattacagggaactcatgagtttgttgaggagccattaaaggctggacatcttgaacattctaccagcccctggaattcgcctatttttgtcattcccaaaaagtcttggaaacagaggtttttaaatgacttacatgatattaatgctaatttacagcccatgggaccccttcaaaaggcctcccctcccccacagtgattactcaagattggcctataattgttattgacttaaaagattgcttctataccattcctccagcagaacaggagagagagaactttgtgtttacaataccagctgtcaataatgaaaagtcagcttgtcaatttcactggcaagtgcttcctcaaggaatgctaaatagtcctaccatgagtcagtatcatgttaatcaagctctgctccctagtagaaaagaatttcctgactgtaaaattattcatcctatagatgatattgtactagcagcctgaacagatcaatacttttacatttgtttacctctgtcctaaagaatacacagctgagaagtttagtcattgcacctggaaaactacaagtgtccaatgtcctctccttggaaataccttggatatctgttaacctcctggtcagtaagacctcaaaaggttaaactaagtactagcaacttatacaccctaaatgattatcagaaattactgggtgatattacctggctccatcccattttgggaattcctaaaaataaactacaaaacctgttttctatcttaaagggcaatccagctcttgattctcccagatatttaatccctgcagcaaaaagagaaatcgaggaaattgagcaagccatctctgagagacggctagatcgcattgatccatggtattcaattcagttgtatatctttcccagcaaacactcccatgcagggttactaggacaaatgacccctgggctacgtttcctacaatggttttttgctcacataaccgagactaaaatactgtctcccgatattcagttaattactagagtcatctattcaggttgcaaacgttgcaatcatttactaagttatgaccctgatgtcatcaggatccctttaaaaagcaattagaagcaggattacctttgtcaatacacctgcaaatagctttctctgattacacagggcaaatagagcacatcctctctgctgataaactccttcatttcttatctcacactccgacaatattgcctataaaaataatttactcccccatgcataatcctttaacactgtttatcaatgggtcggctaaacatggaaaagcagcagcctggagaccccagaattcaatcactcaatctgggttaactagcactcggagagctgcaattggggctctgattttggccttagaaactttttccactcagcccataaatatagttagtgattctgcatactcacttcatttattacaaaagtttgaaacagcactgattaagtccactctggagccagccctgtttactctttttctctgacttcagcaattgctagatcaatgtgcacatcctattgttattacccacatgcgaactcacagctcactgcctgatccgttggtttatggcaatgaacaagctgaccttcaggttatgacatcactgctagaccaagccactcaatcacatccatttttccaccaaatattggagaaacttatctaaacaatttcaagtagcccagagactggctaaacaaattatcctacaatgcccagattgtcaactcacaggcacgtcccctccttctagagatgtgcaccctagagaattggaaactaatcagttgtggcaaacagatgttacagacatccctgaatttgggaagctaagatatggcatgtatcccttgataccaacactcatttaattagtgcagatgctttgcctggagagcctactcgaaatgtcattaaacatcttcttttaacttttgcatttatggggtgacccacaaaaattaagatggataatggcccagcttataccagctcaaaatttaaaaaaaattgtgacacatgcaatattcaacattccacaggcatcccataaaacccccaaggacaggcaatagtagaacatgcacacttcacccttaaaaatatggacaaagaacagaaaaaggggaatataggtaaggctcctgcaacactactggcacaagccttatttacccttaatgtttaaaatttggtgtcaaattgcaatcagctatagaaaagcactttgctaaaacctctcaaggcataaaacctgcagttttatagaaagatgtaaacagtaatgaatggtgtggtcctagcaaattattaacactggggagacggtatgcttgtgtttacattccatcaggtcctctttggattccagcatgaggcatcaaaccataccatggtgtagctaggatccaacccagtaccagaattgaaagagttaaccctgcaagacccacagttctagaggatgcggcttccacagacaacacagccctggacattagctggggatgctgaagaggacaactcaggagactgaacaaatcctgctctggacacagacaccatttactccagataatttttttcttgctatgctttctattgtacattgggattcatatagggtattgatcctttttatcctcttgctttgtctgcaacctgtacctgctacactctattgggctcatatattaggcccacttttctttcaccctgtcacctgggcagacactcccttcccagtctacaataatgtgaccgcttggcaaggaaggatagaattaccccccagcagggtccctcaataatggcaaacattggactaaggtgccagataacactacatatcactccactatcctcccactgcatgtaagttataaaggctctaacccttactgcgtacctggccaaagacaagtatggctacatcatggcaaagaaaatgccttaacatttttagctataggtagcctcaaactgggcaatgcaatccatgcttctttcccaagtagtccttcctgtgccaaagagcagagctgagagagtaatgaatttcactttagctgtgaagtcggtcatgggaaacaagcctatagcctccagtttagcaattaaaacattttagactggagtccccatggccaattgcagggcagccttacaaatgtctttgaccatcatagcattaatcactgtttcatagccacttctcgttcccctctaatttgggctgatggggagatgggatatccccagatcccaagtaaagtccatgccaatccaaggcatgttatggtgcctgggacatcttagtacctaccttaacacctgccatgggagataaaataattccagctgcaactacactatagtctttattcatattcacactgatcagtggctggtttgcactacccatccatatgttttgcttatgggaactaacatttccattaccactggaaactccacatttatgacctgggtgcagggacaggcttggtttgcctcatgtatcactagtcacaatgtatctaaattaaaaacttctagtgtcatggtattaaggagacaatctgaggcatttctaccagtcaatctgacaactgattgacaagctgcctctgcccttgttaccttagaatgtgccctgtcccaggtcagacacaaaagattcacatttacacttacggcctttatagtctcagccataggcgttctggcaatggctagtgttgctgttgcatctataactgaatcagtacaaacagctgcttttgtagataatctggccagaaatgtaagtaatgaacttctcttacagtaagggaagaatgtgtgagagagtgacaagatgcactagcattctgtcaacagttaaactgtgactgggaacataaacacacttgtgtcacttctctaccattgaatcaatcaatgcatagttgggatgaggtgaaacaacacctctggggcaactttcataacaatttaacagcagatatgaagcaacttaaaactaaaattttggaatctgttcacaccttagatctgcagacccaacaaacagccatgtggaagggtgtacaagatcatctctcctagttccatgctcactcctgggggacactctttgactggaaaaaaattttgctaattatgctcatgtttgtcttatgttatttgctaatcctaggatgcaaagtctaaataagagcagtgactgcctcatctgaaaatcctgtggctgcacatatctgtgctctgcaatcaaaaaaccctaataaagaaaacaaaaatggagaa

SEQ ID NO: 5020 - DNA, 2063 bp, Homo sapiens
  source 1..2063: mol_type = other DNA
tcattgagactaccactctgccctgctccatacctctcagcaagccaaattcattgtcttaactcagtccctcactcttgcaaggtgactatgtgtcaatatttatactgcctctaaatatgccttcaatatcctgcaccaccatgctgtatatgggctgaaagaggtttcttcactatgctaggtcctccatcattaatacctccttaataaaaactcttgttaaagccactttacttccaaaggaagctgaagtcattcactacaagggccatcaaaaggcatcagatcccactgctcaagaaaatgcttatgctgataaggtagctaaacaagcagctagcattccaacttctgttcatcatggccactttttctccttctcattgcttactcccacctactctccccctaaatcttccatatatcaatctcttcccacacaaggcaaatggttcttgaaccaaggaaaatatctccagcctcacaggcccattctattctgtcatcatttcataacctcttacatgtaggttacaagccactagcctgactcttagaacctctcatttcctttccatcatggaaatctatcctcaaggaaatcacttctcagtgttccatctgctattctaccacacctcagggattgttcaggccccctcttttccctacccatcaagtggggggatttgcccctgcccaggactggcaaattaactttactcacatgccctgagtcaggaaactaaaatacctcttggtctgggtagacactttcactggatgggtagaggcctttcccacagggtctgagaaggccaccacagtcatttctttccttctgtcagacataattcctcagttttcccttcccacctctgtatagtctgataacagaccagcctttatcagtcacatcactcaggcagtctcccaggctcctggcattcaataataacttcatgctccttatcaccctcaatcctcaggaaaggaagaaagaactaatgattttttaaagccacacctcaccaagcttagcctccaacttagaaaggactggacagtacttttaccaattgcccttctcagaattcgggcctgtcctcgggatgctacagggtacagccatttgagttcctgtattaggccttattaggccccagtctcattccagacaccggccctctaggtgattatcttccagtcctccagcaagctagacaggatattcactgagctgctaatcttcttttgcctaccccagattcccagctatatgaaaacactttaacttgacagtcagttctcgttaaaaatcggacccctcagactctacaacctcagtggactggagcccatttagtcatctatagtatccaaatggctgttcatctgcaggaccaccacccaccattcggttcatcattccagagtaaacctgtgcccatcagacagtctgatttctcctcttccttctgaaagtggcaagtactcacccctacttcccttaaactcacttgcattcctcaatgataatagaaacccttataagcctaatacatcctttcatttttattaggtatcttcttccttaccctactctttacaacagggctttagccagtcacccccactacttggactacacctcaaaaacttgtcgtccttactatcttctgtctagttatactcctattcaccattctcaactactcataagtgcccttgcccttgtttacactgccagtttacacttttcctccaaaccatcgtagtggacatctcctggtactaacccgaatccactactcttgactccctcttacagtggatagatgatttttgctgacagggcgctctccaatactttcaccctgataacgtcctattctttacttttatactcactcttatttttgttctgattcttatattcttatgccaccctctacctctccccagctatctccatcacactaacaatctcactcactctatcctagccttttctaatctttccttaacaaacatttgctggctttgcatttctctttcct

SEQ ID NO: 5021 - protein, 9 aa, synthetic construct
  REGION 1..9: note = synthetic peptide
NLVPMVATV

SEQ ID NO: 5022 - protein, 10 aa, synthetic construct
  REGION 1..10: note = synthetic peptide
TPRVTGGGAM

SEQ ID NO: 5023 - protein, 9 aa, synthetic construct
  REGION 1..9: note = synthetic peptide
RIKEHMLKK

SEQ ID NO: 5024 - protein, 10 aa, synthetic construct
  REGION 1..10: note = synthetic peptide
ELAGIGILTV
